(19) United States
(12) Patent Application Publication
(10) Pub. No.: US 2006/0235215 A1
(43) Pub. Date: Oct. 19, 2006

(54) Stress-related polypeptides and uses therefor

(76) Inventor: Bret Cooper, Laurel, CA (US)

Correspondence Address: JENKINS, WILSON, TAYLOR & HUNT, P. A., 3100 TOWER BLVD, SUITE 1200, DURHAM, NC, 27707, US

(21) Appl. No.: 10/533,176

(22) PCT Filed: Dec. 23, 2003
(86) PCT No.: PCT/US03/41098

§ 371 Date: Apr. 12, 2006

Related U.S. Application Data
(60) Provisional application No. 60/436,564, filed on Dec. 26, 2002.

(51) Int. Cl. C12N 15/29; C12N 15/82; A01H 5/00

(52) U.S. Cl. 536/23.6; 435/419; 530/370; 800/298; 435/320.1; 800/278

(57) ABSTRACT

Disclosed are proteins, and nucleic acids encoding such proteins, involved in or associated with the stress response (both biotic and abiotic stress) in plants. Also disclosed are uses for such proteins.

### CROSS REFERENCE TO RELATED APPLICATIONS

[0001] This application is based on and claims priority to U.S. Provisional Application Ser. No. 60/463,564, filed Dec. 26, 2002, which is herein incorporated by reference in its entirety.

### TECHNICAL FIELD

[0002] The presently disclosed subject matter relates, in general, to transgenic plants. More particularly, the presently disclosed subject matter relates to stress-related polypeptides, nucleic acid molecues encoding the polypeptides, and uses thereof.

### Table of Abbreviations

[0003] ABA—abscisic acid
[0004] AOS—active oxygen species
[0005] FPD—Functional Protein Domain
[0006] HR—hypersensitive response
[0007] HSPs—high scoring sequence pairs
[0008] LR—local resistance
[0009] PP2A—type 2A serine/threonine protein phosphatase
[0010] SA—salicylic acid
[0011] SAR—systemic acquired resistance

### Amino Acid Abbreviations and Corresponding mRNA Codons

[0012]

| | 3- | 1- | |
|---|---|---|---|
| Amino Acid | Letter | Letter | mRNA Codons |
| Alanine | Ala | A | GCA GCC GCG GCU |
| Arginine | Arg | R | AGA AGG CGA CGC CGG CGU |
| Asparagine | Asn | N | AAC AAU |
| Aspartic Acid | Asp | D | GAG GAU |
| Cysteine | Cys | C | UGC UGU |
| Glutamic Acid | Glu | E | GAA GAG |
| Glutamine | Gln | Q | CAA GAG |
| Glycine | Gly | G | GGA GGC GGG GGU |
| Histidine | His | H | CAC CAU |
| Isoleucine | Ile | I | AUA AUC AUU |
| Leucine | Leu | L | UUA UUG CUA CUC CUG CUU |
| Lysine | Lys | K | AAA AAG |
| Methionine | Met | M | AUG |
| Proline | Pro | P | CCA CCC CCG CCU |
| Phenylalanine | Phe | F | UUC UUU |
| Serine | Ser | S | ACG AGU UCA UCC UCG UCU |
| Threonine | Thr | T | ACA ACC ACG ACU |
| Tryptophan | Trp | W | UGG |
| Tyrosine | Tyr | Y | UAC UAU |
| Valine | Val | V | GUA GUC GUG GUU |

### BACKGROUND ART

[0013] As some of the major human staples, monocot plants such as rice, corn, and wheat have been a target of genetic engineering for resistance to diseases, pests, and environmental stresses of various kinds. Knowledge of plant-pathogen interactions and the complex networks of proteins that act in concert to respond to environmental stresses has important applications in agriculture, providing new approaches to disease control. Modulation of interactions between proteins that participate in stress responses can be exploited for the development of genetically engineered plants that are resistant to pathogens. The production of pest-resistant crops provides an alternative to environmentally damaging pesticides for improvement of agricultural yield.

[0014] For example, detailed knowledge of signaling pathways regulating innate immunity can help develop strategies for durable crop protection. Resistance to disease occurs on several levels that include local and nonspecific systemic responses. The hypersensitive response (HR) in plants is a mechanism of local resistance to pathogenic microbes characterized by a rapid and localized tissue collapse and cell death at the infection site, resulting in immobilization of the intruding pathogen. This process is triggered by pathogen elicitors and orchestrated by an oxidative burst, which occurs rapidly after the attack (Lamb & Dixon, 1997). The accumulation of active oxygen species (AOS) is a central theme during plant responses to both biotic and abiotic stresses. AOS are generated at the onset of the HR and might be instrumental in killing host tissue during the initial stages of infection. AOS also act as signaling molecules that induce expression of PR genes and production of other signaling molecules which participate in the signal cascade that leads to PR gene induction. The triggering of defense genes can extend to the uninfected tissues and the whole plant, leading to local resistance (LR) and systemic acquired resistance (SAR; reviewed in Martinez et al., 2000). As a result of SAR, other portions of the plant are provided with long-lasting protection against the same and unrelated pathogens.

[0015] Hydrogen peroxide from the oxidative burst plays an important role in the localized HR not only by driving the cross-linking of cell wall structural proteins, but also by triggering cell death in challenged cells and as a diffusible signal for the induction in adjacent cells of genes encoding cellular protectants such as glutathione S-transferase and glutathione peroxidase (Levine et al., 1994) and for the production of salicylic acid (SA). SA is thought to act as a signaling molecule in LR and SAR through generation of SA radicals, a likely by-product of the interaction of SA with catalases and peroxidases, as reported by Martinez et al., 2000. These authors showed that recognition of a bacterial pathogen by cotton triggers the oxidative burst that precedes the production of SA in cells undergoing the HR, and that hydrogen peroxide is required for local and systemic accumulation of SA, thus acting as the initiating signal for LR and SAR. The involvement of catalase in SA-mediated induction of SAR in plants was previously demonstrated by Chen et al., 1993 who showed that binding of catalase to SA results in inhibition of catalase activity, and that consequent accumulation of hydrogen peroxide induces expression of defense-related genes associated with SAR.

[0016] The cell wall can also play a role in defense against bacterial and fungal pathogens by receiving information from the surface of the pathogen from molecules called elicitors, and by transmitting this information to the plasma membrane of plant cells, resulting in gene-activated processes that lead to resistance. One type of biochemical reaction induced by elicitors and associated with the hypersensitive response is the synthesis and accumulation of phytoalexins, antimicrobial compounds produced in the plant after fungal or bacterial infection (reviewed in Hammerschmidt, 1999). Other responses can involve the expression of proteases that activate other signalling molecules, and enzymes that allow the plant to respond; with morphological changes to physical insult produced by pathogen attack.

[0017] Stress responses do not occur in isolation from other cellular processes, but can be intimately linked to other aspects of plant growth and development, such as control of the cell cycle and senescence. Some proteins are known to act both in general pathways of cellular growth and development as well as in response to particular stresses. For example, type 2A serine/threonine protein phosphatases (PP2A) are important regulators of signal transduction, which they affect by dephosphorylation of other proteins (Janssens & Goris, 2001). There are multiple PP2A isoforms in plants and other organisms, and they appear to be differentially expressed in various tissues and at different stages of development (Arino et al., 1993). Harris et al. cites a number of reports describing the association of PP2A subunits with a variety of cellular proteins in addition to regulatory subunits, suggesting that PP2As function as regulators of various signaling pathways associated with protein synthesis, cell cycle and apoptosis (Harris et al., 1999). PP2A enzymes have been implicated as mediators of a number of plant growth and developmental processes.

[0018] In addition, PP2A enzymes play a role in pathogen invasion. In animals, a variety of viral proteins target specific PP2A enzymes to deregulate chosen cellular pathways in the host and promote viral progeny (Sontag, 2001; Garcia et al., 2000). PP2A enzymes interact with many cellular and viral proteins, and these protein-protein interactions are critical to modulation of PP2A signaling (Sontag, supra). The proteins interacting with PP2A (e.g., PP2A) can, for example, target PP2A to different subcellular compartments, or affect PP2A enzyme activity.

[0019] To modulate plant responses to biotic and abiotic stresses, there is a need for a more comprehensive udnerstanding of signaling pathways and networks of protein-protein interactions. Further, additional factors involved in these networks must be identified to facilitate the engineering of plants more tolerant to biotic and abiotic stresses.

### SUMMARY

[0020] This Summary lists several embodiments of the presently disclosed subject matter, and in many cases lists variations and permutations of these embodiments. This Summary is merely exemplary of the numerous and varied embodiments. Mention of one or more representative features of a given embodiment is likewise exemplary. Such an embodiment can typically exist with or without the feature(s) mentioned; likewise, those features can be applied to other embodiments of the presently disclosed subject matter, whether listed in this Summary or not. To avoid excessive repetition, this Summary does not list or suggest all possible combinations of such features.

[0021] The presently disclosed subject matter provides proteins and nucleic acid molecules encoding such proteins that are involved in the control and regulation of plant maturation and development, including proliferation, senescence, disease-resistance, stress response including stress-resistance, and differentiation. The presently disclosed subject matter provides compositions comprising at least one of the proteins described herein, as well as methods for using the proteins disclosed herein to affect plant maturation, development, and responses to stress.

[0022] The presently disclosed subject matter provides an isolated nucleic acid molecule encoding a stress-related polypeptide, wherein the polypeptide binds in a yeast two hybrid assay to a fragment of a protein selected from the group consisting of OsGF14-c (SEQ ID NO: 113), OsDAD1 (SEQ ID NO: 128), Os006819-2510 (SEQ ID NO: 20), OsCRTC (SEQ ID NO: 134), OsSGT1 (SEQ ID NO: 144), OsERP (SEQ ID NO: 146), OsCHIB1 (SEQ ID NO: 152), OsCS (SEQ ID NO: 156), OsPP2A-2 (SEQ ID NO: 164), and OsCAA90866 (SEQ ID NO: 170). In one embodiment, the isolated nucleic acid molecule is derived from rice (Oryza sativa). In another embodiment, the isolated nucleic acid molecule comprises a nucleic acid sequence selected from the group consisting of odd numbered SEQ ID NOs: 1-111.

[0023] The presently disclosed subject matter also provides a description of interactions between stress-related proteins and polypeptides encoded by the isolated nucleic acid molecules disclosed herein. In one embodiment, the isolated nucleic acid molecule comprises a nucleic acid sequence of one of odd numbered SEQ ID NOs: 1-15 and the protein comprises an amino acid sequence of SEQ ID NO: 114. In another embodiment, the isolated nucleic acid molecule comprises a nucleic acid sequence of one of SEQ ID NOs: 7 and 17 and the protein comprises an amino acid sequence of SEQ ID NO: 128. In another embodiment, the isolated nucleic acid molecule comprises a nucleic acid sequence of one of odd numbered SEQ ID NOs: 21-25 and the protein comprises an amino acid sequence of SEQ ID NO: 20. In another embodiment, the isolated nucleic acid molecule comprises a nucleic acid sequence of SEQ ID NO: 27 and the protein comprises an amino acid sequence of SEQ ID NO: 134. In another embodiment, the isolated nucleic acid molecule comprises a nucleic acid sequence of SEQ ID NO: 29 and the protein comprises an amino acid sequence of SEQ ID NO: 138. In another embodiment, the isolated nucleic acid molecule comprises a nucleic acid sequence of one of odd numbered SEQ ID NOs: 31-43 and the protein comprises an amino acid sequence of SEQ ID NO: 144. In another embodiment, the isolated nucleic acid molecule comprises a nucleic acid sequence of one of odd numbered SEQ ID NOs: 45-67 and the protein comprises an amino acid sequence of SEQ ID NO: 146. In another embodiment, the isolated nucleic acid molecule comprises a nucleic acid sequence of SEQ ID NO: 69 and the protein comprises an amino acid sequence of SEQ ID NO: 36. In another embodiment, the isolated nucleic acid molecule comprises a nucleic acid sequence of one of odd numbered SEQ ID NOs: 71-77 and the protein comprises an amino acid sequence of SEQ ID NO: 152. In another embodiment, the isolated nucleic acid molecule comprises a nucleic acid sequence of one of odd numbered SEQ ID NOs: 79-95 and the protein comprises an amino acid sequence of SEQ ID NO: 156. In another embodiment, the isolated nucleic acid molecule comprises a nucleic acid sequence of one of odd numbered SEQ ID NOs: 97-105 and the protein comprises an amino acid sequence of SEQ ID NO: 164. In still another embodiment, the isolated nucleic acid molecule comprises a nucleic acid sequence of one of odd numbered SEQ ID NOs: 97 and 107-111 and the protein comprises an amino acid sequence of SEQ ID NO: 170.

[0024] The presently disclosed subject matter also provides an isolated nucleic acid molecule encoding a stress-related polypeptide, wherein the nucleic acid molecule is selected from the group consisting of:
[0025] (a) a nucleic acid molecule encoding a polypeptide comprising an amino acid sequence of one of even numbered SEQ ID NOs: 2-112;
[0026] (b) a nucleic acid molecule comprising a nucleic acid sequence of one of odd numbered SEQ ID NOs: 1-111;
[0027] (c) a nucleic acid molecule that has a nucleic acid sequence at least 90% identical to the nucleic acid sequence of the nucleic acid molecule of (a) or (b);
[0028] (d) a nucleic acid molecule that hybridizes to (a) or (b) under conditions of hybridization selected from the group consisting of:
   [0029] (i) 7% sodium dodecyl sulfate (SDS), 0.5 M NaPO4, 1 mM ethylenediamine tetraacetic acid (EDTA) at 50° C. with a final wash in 2× standard saline citrate (SSC), 0.1% SDS at 50° C.;
   [0030] (ii) 7% SDS, 0.5 M NaPO4, 1 mM EDTA at 50° C. with a final wash in 1×SSC, 0.1% SDS at 50° C.;
   [0031] (iii) 7% SDS, 0.5 M NaPO4, 1 mM EDTA at 50° C. with a final wash in 0.5×SSC, 0.1% SDS at 50° C.;
   [0032] (iv) 7% sodium dodecyl sulfate (SDS), 0.5 M NaPO4, 1 mM EDTA at 50° C. with a final wash in 0.1×SSC, 0.1% SDS at 50° C.; and
   [0033] (v) 7% sodium dodecyl sulfate (SDS), 0.5 M NaPO4, 1 mM EDTA at 50° C. with a final wash in 0.1×SSC, 0.1% SDS at 65° C.;
[0034] (e) a nucleic acid molecule comprising a nucleic acid sequence fully complementary to (a); and
[0035] (f) a nucleic acid molecule comprising a nucleic acid sequence that is the full reverse complement of (a).

[0036] The presently disclosed subject matter also provides an isolated stress-related polypeptide encoded by the disclosed isolated nucleic acid molecules, or a functional fragment, domain, or feature thereof.

[0037] The presently disclosed subject matter also provides a method for producing a polypeptide disclosed herein, the method comprising the steps of: (a) growing cells comprising an expression cassette under suitable growth conditions, the expression cassette comprising a nucleic acid molecule as disclosed herein; and (b) isolating the polypeptide from the cells.

[0038] The presently disclosed subject matter also provides a transgenic plant cell comprising an isolated nucleic acid molecule disclosed herein. In one embodiment, the plant is selected from the group consisting of corn (Zea mays), Brassica sp., alfalfa (Medicago sativa), rice (Oryza sativa ssp.), rye (Secale cereale), sorghum (Sorghum bicolor, Sorghum vulgare), pearl millet (Pennisetum glaucum), proso millet (Panicum miliaceum), foxtail millet (Setaria italica), finger millet (Eleusine coracana), sunflower (Helianthus annuus), safflower (Carthamus tinctorius), wheat (Triticum aestivum), soybean (Glycine max), tobacco (Nicotiana tabacum), potato (Solanum tuberosum), peanut (Arachis hypogaea), cotton, sweet potato (Ipomoea batatus), cassaya (Manihot esculenta), coffee (Cofea spp.), coconut (Cocos nucifera), pineapple (Ananas comosus), citrus trees (Citrus spp.), cocoa (Theobroma cacao), tea (Camellia sinensis), banana (Musa spp.), avocado (Persea ultilane), fig (Ficus casica), guava (Psidium guajava), mango (Mangifera indica), olive (Olea europaea), papaya (Carica papaya), cashew (Anacardium occidentale), macadamia (Macadamia integrifolia), almond (Prunus amygdalus), sugar beets (Beta vulgaris), sugarcane (Saccharum spp.), oats, duckweed (Lemna), barley, a vegetable, an ornamental, and a conifer. In another embodiment, the plant is rice (Oryza sativa ssp.). In one embodiment, the duckweed is selected from the group consisting of genus Lemna, genus Spirodela, genus Woffia, and genus Wofiella. In one embodiment, the vegetable is selected from the group consisting of tomatoes, lettuce, guar, locust bean, fenugreek, soybean, garden beans, cowpea, mungbean, lima bean, fava bean, lentils, chickpea, green bean, lima bean, pea, and members of the genus Cucumis. In one embodiment, the ornamental is selected from the group consisting of impatiens, Begonia, Pelargonium, Viola, Cyclamen, Verbena, Vinca, Tagetes, Primula, Saint Paulia, Agertum, Amaranthus, Antihirrhinum, Aquilegia, Cineraria, Clover, Cosmo, Cowpea, Dahlia, Datura, Delphinium, Gerbera, Gladiolus, Gloxinia, Hippeastrum, Mesembryanthemum, Salpiglossos, and Zinnia, azalea, hydrangea, hibiscus, rose, tulip, daffodil, petunia, carnation, poinsettia, and chrysanthemum. In one embodiment, the conifer is selected from the group consisting of loblolly pine, slash pine, ponderosa pine, lodgepole pine, Monterey pine, Douglas-fir, Western hemlock, Sitka spruce, redwood, silver fir, balsam fir, Western red cedar, and Alaska yellow-cedar.

[0039] In another embodiment, the transgenic plant is a plant selected from the group consisting of Acacia, aneth, artichoke, arugula, blackberry, canola, cilantro, clementines, escarole, eucalyptus, fennel, grapefruit, honey dew, jicama, kiwifruit, lemon, lime, mushroom, nut, okra, orange, parsley, persimmon, plantain, pomegranate, poplar, radiata pine, radicchio, Southern pine, sweetgum, tangerine, triticale, vine, yams, apple, pear, quince, cherry, apricot, melon, hemp, buckwheat, grape, raspberry, chenopodium, blueberry, nectarine, peach, plum, strawberry, watermelon, eggplant, pepper, cauliflower, Brassica, broccoli, cabbage, ultilan sprouts, onion, carrot, leek, beet, broad bean, celery, radish, pumpkin, endive, gourd, garlic, snapbean, spinach, squash, turnip, ultilane, and zucchini.

[0040] The presently disclosed subject matter also provides an isolated stress-related polypeptide, wherein the polypeptide binds in a yeast two hybrid assay to a fragment of a protein selected from the group consisting of OsGF14-c (SEQ ID NO: 113), OsDAD1 (SEQ ID NO: 128), Os006819-2510 (SEQ ID NO: 20), OsCRTC (SEQ ID NO: 134), OsSGT1 (SEQ ID NO: 144), OsERP (SEQ ID NO: 146), OsCHIB1 (SEQ ID NO: 152), OsCS (SEQ ID NO: 156), OsPP2A-2 (SEQ ID NO: 164), and OsCAA90866 (SEQ ID NO: 170). In one embodiment, the isolated stress-related polypeptide is selected from the group consisting of (a) a polypeptide comprising an amino acid sequence of even numbered SEQ ID NOs: 2-112; and (b) a polypeptide comprising an amino acid sequence at least 80% similar to the polypeptide of (a) using the GCG Wisconsin Package SEQWEB® application of GAP with the default GAP analysis parameters. In another embodiment, the polypeptide comprises an amino acid sequence of one of even numbered SEQ ID NOs: 2-112.

[0041] The presently disclosed subject matter also provides an expression cassette comprising a nucleic acid molecule encoding a stress-related polypeptide disclosed herein. In one embodiment, the nucleic acid molecule encoding a stress-related polypeptide comprises a nucleic acid sequence selected from odd numbered SEQ ID NOs: 1-111. In one embodiment, the expression cassette further comprises a regulatory element operatively linked to the nucleic acid molecule. In one embodiment, the regulatory element comprises a promoter. In one embodiment, the promoter is a plant promoter. In another embodiment, the promoter is a constitutive promoter. In another embodiment, the promoter is a tissue-specific or a cell type-specific promoter. In one embodiment, the tissue-specific or cell type-specific promoter directs expression of the expression cassette in a location selected from the group consisting of epidermis, root, vascular tissue, meristem, cambium, cortex, pith, leaf, flower, seed, and combinations thereof.

[0042] The presently disclosed subject matter also provides a transgenic plant cell comprising a disclosed expression cassette. In one embodiment, the expression cassette comprises an isolated nucleic acid molecule comprising a nucleic acid sequence of one of odd numbered SEQ ID NOs: 1-111.

[0043] The presently disclosed subject matter also provides transgenic plants comprising a disclosed expression cassette, as well as transgenic seeds and progeny of the trangenic plants disclosed herein.

[0044] The presently disclosed subject matter also provides a method for modulating stress response of a plant cell comprising introducing into the plant cell an expression cassette comprising an isolated nucleic acid molecule encoding a stress-related polypeptide, wherein the polypeptide binds in a yeast two hybrid assay to a fragment of a protein selected from the group consisting of OsGF14-c (SEQ ID NO: 113), OsDAD1 (SEQ ID NO: 128), OsO06819-2510 (SEQ ID NO: 20), OsCRTC (SEQ ID NO: 134), OsSGT1 (SEQ ID NO: 144), OsERP (SEQ ID NO: 146), OsCHIB1 (SEQ ID NO: 152), OsCS (SEQ ID NO: 156), OsPP2A-2 (SEQ ID NO: 164), and OsCAA90866 (SEQ ID NO: 170). In one embodiment of the disclosed method, the expression of the polypeptide in the cell results in an enhancement of a rate or extent of proliferation of the cell. In another embodiment, the expression of the polypeptide in the cell results in a decrease in a rate or extent of proliferation of the cell.

[0045] In another embodiment of the instant method, the isolated nucleic acid molecule comprises a nucleic acid sequence selected from one of odd numbered SEQ ID NOs: 1-173. In another embodiment, the isolated nucleic acid molecule comprises a nucleic acid sequence selected from one of odd numbered SEQ ID NOs: 1-111.

[0046] Accordingly, it is an object of the presently disclosed subject matter to provide methods and compositions that can be used to enhance agriculturally important plants. This object is achieved in whole or in part by the presently disclosed subject matter.

[0047] An object of the presently disclosed subject matter having been stated above, other objects and advantages will become apparent to those of ordinary skill in the art after a study of the following description of the presently claimed subject matter and non-limiting Examples.

### BRIEF DESCRIPTION OF THE DRAWINGS

[0048] FIG. 1 is a schematic representation of the interactions between various, non-limiting, stress-related proteins of the invention. Arrows indicate interaction direction between DNA binding domain fused proteins (thick lined boxes or ovals) and activation domain fused proteins. Dotted boxes indicate previously published interactions. Ovals rather than boxes indicate that a protein fused to the DNA binding domain did not interact with other proteins. Circular arrows depict self-interactions. Dotted lines indicate amino acid similarity between proteins. The proteins listed in the Figure can be classified as follows: biotic stress (20251); abiotic stress (12464, 19902, 22844, 22874, 23059, and 23426); and chloroplast (19842, 22832, 22840, 22844, 22858, 22874, 23059, 23061, 23426, and 30846).

[0049] FIG. 2 is a schematic representation of the interactions between various, non-limiting, stress-related proteins of the invention. Arrows indicate interaction direction between DNA binding domain fused proteins (thick lined boxes or ovals) and activation domain fused proteins. Dotted boxes indicate previously published interactions. Ovals rather than boxes indicate that a protein fused to the DNA binding domain did not interact with other proteins. Circular arrows depict self-interactions. Dotted lines indicate amino acid similarity between proteins. The proteins listed in the Figure can be classified as follows: development (glutamyl amino peptidase); biotic stress (19651, 20899, and 22823); abiotic stress (20775, 29077, 29098, 29086, and 29113).

[0050] FIG. 3 is a schematic representation of the interactions between various, non-limiting, stress-related proteins of the invention. Arrows indicate interaction direction between DNA binding domain fused proteins (thick lined boxes or ovals) and activation domain fused proteins. Dotted boxes indicate previously published interactions. Ovals rather than boxes indicate that a protein fused to the DNA binding domain did not interact with other proteins. Circular arrows depict self-interactions. Dotted lines indicate amino acid similarity between proteins. The proteins listed in the Figure can be classified as follows: biotic stress (ORF020300-2233.2, 23268, 011994-D16, and OsPP2-A) and abiotic stress (23225, OsCAA90866, and 3209-OS208938).

### BRIEF DESCRIPTION OF THE SEQUENCE LISTING

[0051] SEQ ID NOs: 1-174 present nucleic acid and amino acid sequences of the rice (Oryza sativa) polypeptides employed in the two hybrid assays disclosed hereinbelow. For these SEQ ID NOs., the odd numbered sequences are nucleic acid sequences, and the even numbered sequences are the deduced amino acid sequences of the nucleic acid sequence of the immediately preceding SEQ ID NO: For example, SEQ ID NO: 2 is the deduced amino acid sequence of the nucleic acid sequence presented in SEQ ID NO: 1, SEQ ID NO: 4 is the deduced amino acid sequence of the nucleic acid sequence presented in SEQ ID NO: 3, SEQ ID NO: 6 is the deduced amino acid sequence of the nucleic acid sequence presented in SEQ ID NO: 5, etc. Further description of the SEQ ID NOs. is presented in the following Table:

| SEQ ID | PN | |
|---|---|---|
| NOs. | Number | Description |
| 1, 2 | 22858 | Novel Protein 22858, Fragment, similar to |
| | | Arabidopsis GTP Cyclohydrolase II |
| | | (BAB09512.1; e = 0) |
| 3, 4 | 22874 | Novel Protein 22874, Fragment, similar to |
| | | Arabidopsis Putative Phosphatidylinositol-4- |
| | | phosphate 5-kinase (NP_187603.1; 4e⁻¹⁸) |
| 5, 6 | 22866 | Novel Protein PN22866, Fragment, Similar to |
| | | A. Thaliana Vacuolar ATP Synthase Subunit C |
| | | (V-ATPase C subunit; Vacuolar proton pump C |
| | | subunit; Q9SDS7; e⁻¹⁵²) |
| 7, 8 | 23022 | Novel Protein PN23022, Fragment, similar to |
| | | H. Vulgare Plasma Membrane H⁺-ATPase |
| | | (CAC50884; e = 0.0) |
| 9, 10 | 23061 | Hypothetical Protein OsContig3864, Similar to |
| | | H. Vulgare Photosystem I Reaction Center |
| | | Subunit II, Chloroplast Precursor |
| | | (P36213; 6e⁻⁸⁷) |
| 11, 12 | 29982 | Novel Protein PN29982 |
| 13, 14 | 30846 | Novel Protein PN30846 |
| 15, 16 | 30974 | Novel Protein PN30974 |
| 17, 18 | 23053 | Novel Protein 23053, Fragment, Similar to |
| | | Arabidopsis Putative Na+-Dependent Inorganic |
| | | Phosphate Cotransporter (NP_181341.1; e⁻¹⁰⁵) |
| 19, 20 | 20462 | Hypothetical Protein 006819-2510, Similar to |
| | | Senescence-Related Protein 5 from |
| | | Hemerocallis Hybrid Cultivar |
| | | (AAC34855.1; e⁻⁹⁷) |
| 21, 22 | 23226 | Novel Protein PN23226, Callose synthase |
| 23, 24 | 23485 | Novel Protein PN23485, Similar to Hordeum |
| | | vulgare Coproporphyrinogen III Oxidase, |
| | | chloroplast precursor (Q42840; e⁻¹⁶⁹) |
| 25, 26 | 29037 | Novel Protein PN29037 |
| 27, 28 | 29950 | Novel Protein PN29950 |
| 29, 30 | 20551 | Hypothetical Protein 003118-3674 Similar to |
| | | Lycopersicon esculentum Calmodulin |
| 31, 32 | 24060 | L-aspartase-like protein-like |
| 33, 34 | 23914 | RNA binding domain protein |
| 35, 36 | 23221 | Proline rich protein |
| 37, 38 | 24061 | Auxin induced protein-like |
| 39, 40 | 23949 | HSP70-like |
| 41, 42 | 28982 | Archain delta COP-like |
| 43, 44 | 29042 | Fibrillin-like |
| 45, 46 | 29984 | Novel Protein PN29950 |
| 47, 48 | 30844 | Novel protein PN30844 |
| 49, 50 | 30868 | NAD(P) binding domain protein |
| 51, 52 | 24292 | Gamma adaptin-like |
| 53, 54 | 29983 | Novel protein PN29983 |
| 55, 56 | 30845 | Pectinesterase-like |
| 57, 58 | 31085 | Receptor-like protein kinase-like |
| 59, 60 | 20674 | Pyruvate orthophosphate dikinase-like |
| 61, 62 | 30870 | Isp-4 like |
| 63, 64 | 29997 | Xanthine dehydrogenase-like |
| 65, 66 | 30843 | Ubiquitin specific protease-like |
| 67, 68 | 30857 | Novel protein PN30857 |
| 69, 70 | 20115 | Ring zinc finger protein |
| 71, 72 | 22823 | Novel Protein PN22823, Similar to ABC |
| | | Transporter Proteins (T02187, AB043999.1, |
| | | NP_171753; e = 0) |
| 73, 74 | 22154 | Novel Protein PN22154, Similar to A. Thaliana |
| | | Glutamyl Aminopeptidase (AL035525; e = 0) |
| 75, 76 | 29041 | Novel Protein PN29041, Fragment, Similar to |
| | | A. Thaliana Putative ATPase (AAG52137; e⁻¹⁷) |
| 77, 78 | 22020 | Novel Protein PN22020, Fragment, Similar to |
| | | A. Thaliana Putative Protein (NP_197783; 3e⁻³⁴) |
| 79, 80 | 22825 | Novel Protein PN22825, Fragment |
| 81, 82 | 29076 | Novel Protein PN29076, Fragment |
| 83, 84 | 29077 | Novel Protein PN29077, Fragment, Similar to |
| | | A. Thaliana DNA-Damage Inducible Protein |
| | | DDI1-Like (BAB02792; 5e⁻⁹⁴) |
| 85, 86 | 29084 | Novel Protein PN29084, Fragment, Similar to |
| | | Soybean (Glycine max) Calcium-Dependent |
| | | Protein Kinase (A43713, 2e⁻⁷⁹) |
| 87, 88 | 29115 | Novel Protein PN29115, Fragment, Similar to |
| | | A. Thaliana 6,7-Dimethyl-8-Ribityllumazine |
| | | Synthase Precursor (AAK93590, 6e⁻³⁷) |
| 89, 90 | 29116 | Novel Protein PN29116, Fragment |
| 91, 92 | 29117 | Novel Protein PN29117 |
| 93, 94 | 29118 | Novel Protein PN29118, Fragment |
| 95, 96 | 29119 | Novel Protein PN29119, Fragment |
| 97, 98 | 21639 | Hypothetical Protein ORF020300-2233.2, |
| | | Putative PP2A Regulatory Subunit, Similar to |
| | | OsCAA90866 (AAD39930; 5e⁻⁹²; CAA90866; |
| | | 5e⁻⁵³) |
| 99, 100 | 23268 | Novel Protein 23268, Similar to |
| | | Phosphoribosylanthranilate Transferase, |
| | | Chloroplast Precursor, Fragment |
| | | (AAB02913.1; 5e⁻⁹⁵) |
| 101, 102 | 26645 | Novel Protein PN26645, Putative Protein |
| | | Disulfide Isomerase-Related Protein Precursor |
| | | (BAB09470.1; e⁻²⁸) |
| 103, 104 | 24162 | Novel Protein PN24162, Porin-like, Voltage- |
| | | Dependent Anion Channel Protein |
| | | (NP_201551; 3e⁻⁸⁶) |
| 105, 106 | 20618 | Hypothetical Protein 011994-D16, Similar to |
| | | Z. mays DnaJ protein (T01643; e = 0) |
| 107, 108 | 23045 | Novel Protein PN23045 |
| 109, 110 | 23225 | Novel Protein PN23225, Similar to Tritticum |
| | | aestivum Initiation Factor (iso)4f p82 Subunit |
| | | (AAA74724; e = 0) |
| 111, 112 | 29883 | Novel Protein PN29883, Fragment |
| 113, 114 | 12464 | O. sativa 14-3-3 Protein Homolog GF14-c |
| | | (U65957) |
| 115, 116 | 22844 | O. sativa 3-Phosphoshikimate 1- |
| | | carboxyvinyltransferase (a.k.a. EPSP |
| | | Synthase; AB052962; BAB61062.1) |
| 117, 118 | 22832 | O. sativa Fructose-Bisphosphate Aldolase, |
| | | Chloroplast Precursor (Q40677) |
| 119, 120 | 23426 | O. sativa Chloroplast Ribulose Bisphosphate |
| | | Carboxylase, Large Chain (D00207; P12089) |
| 121, 122 | 19842 | O. sativa Ribulose Bisphosphate |
| | | Carboxylase/Oxygenase Activase, Large |
| | | Isoform A1 (AB034698, BAA97583) |
| 123, 124 | 23059 | OsContig4331, O. sativa Putative 33 kDa |
| | | Oxygen-Evolving Protein of Photosystem II |
| | | (BAB64069) |
| 125, 126 | 22840 | O. sativa Photosystem II 10 kDa Polypeptide |
| | | (U86018; T04177) |
| 127, 128 | 20251 | O. sativa Defender Against Apoptotic Death 1 |
| | | (D89727; BAA24104) |
| 129, 130 | 19902 | Beta-Expansin EXPB2 |
| | | (U95968; AAB61710) |
| 131, 132 | 24059 | O. sativa Histone Deacetylase HD1 |
| | | (AF332875; AAK01712.1) |
| 133, 134 | 20544 | O. sativa Calreticulin Precursor |
| | | (AB021259; BAA88900) |
| 135, 136 | 22883 | Oryza sativa Low Temperature-Induced Protein |
| | | 5 (AB011368; BAA24979.1) |
| 137, 138 | 23878 | Oryza sativa Putative Myosin |
| | | (AC090120; AAL31066.1) |
| 139, 140 | 20554 | O. sativa DEHYDRIN RAB 16B (P22911) |
| 141, 142 | 19701 | Soluble Starch Synthase (AF165890; |
| | | AAD49850) |
| 143, 144 | 20285 | OsSGT1 (gi\|6581058) |
| 145, 146 | 20696 | Elicitor responsive protein (gi\|11358958) |
| 147, 148 | 24063 | RAS GTPase (gi\|730510) |
| 149, 150 | 20621 | Shaggy kinase (gi\|13677093) |
| 151, 152 | 19651 | O. sativa Chitinase, Class III (AF296279; |
| | | AAG02504) |
| 153, 154 | 20899 | O. sativa Catalase A Isozyme (D29966; |
| | | BAA06232) |
| 155, 156 | 19707 | O. sativa Cellulose Synthase Catalytic Subunit, |
| | | RSW1-Like (AF030052; AAC39333) |
| 157, 158 | 29086 | O. sativa salT Gene Product (AF001395; |
| | | AAB53810.1) |
| 159, 160 | 29098 | O. sativa Aquaporin (AF062393) |
| 161, 162 | 29113 | O. sativa DNAJ Homologue (BAB70509.1) |
| 163, 164 | 20254 | O. sativa Serine/Threonine Protein |
| | | Phosphatase PP2A-2, Catalytic Subunit |
| | | (AF134552, AAD22116) |
| 165, 166 | 23266 | O. sativa Putative Proline-Rich Protein |
| | | AAK63900 (AC084884) |
| 167, 168 | 24775 | O. sativa Glutelin CAA33838 (X15833) |
| 169, 170 | 20311 | O. sativa Chilling-Inducible Protein CAA90866 |
| | | (Z54153, CAA90866) |
| 171, 172 | 20215 | O. sativa Putative 14-3-3 Protein (AAK38492) |
| 173, 174 | 23186 | O. sativa Putative Pyrrolidone Carboxyl |
| | | Peptidase (AAG46136) |

### DETAILED DESCRIPTION

[0052] The presently disclosed subject matter will be now be described more fully hereinafter with reference to the accompanying Examples, in which representative embodiments of the presently disclosed subject matter are shown. The presently disclosed subject matter can, however, be embodied in different forms and should not be construed as limited to the embodiments set forth herein. Rather, these embodiments are provided so that this disclosure will be thorough and complete, and will fully convey the scope of the presently disclosed subject matter to those skilled in the art.

[0053] All of the patents (including published patent applications) and publications (including GENBANK® sequence references), which are cited herein, are hereby incorporated by reference in their entireties to the same extent as if each were specifically stated to be incorporated by reference. Any inconsistency between these patents and publications and the present disclosure shall be resolved in favor of the present disclosure.

I. General Considerations

[0054] A goal of functional genomics is to identify genes controlling expression of organismal phenotypes, and functional genomics employs a variety of methodologies including, but not limited to, bioinformatics, gene expression studies, gene and gene product interactions, genetics, biochemistry, and molecular genetics. For example, bioinformatics can assign function to a given gene by identifying genes in heterologous organisms with a high degree of similarity (homology) at the amino acid or nucleotide level. Studies of the expression of a gene at the mRNA or polypeptide levels can assign function by linking expression of the gene to an environmental response, a developmental process, or a genetic (mutational) or molecular genetic (gene overexpression or underexpression) perturbation. Expression of a gene at the mRNA level can be ascertained either alone (for example, by Northern analysis) or in concert with other genes (for example, by microarray analysis), whereas expression of a gene at the polypeptide level can be ascertained either alone (for example, by native or denatured polypeptide gel or immunoblot analysis) or in concert with other genes (for example, by proteomic analysis). Knowledge of polypeptide/polypeptide and polypeptide/DNA interactions can assign function by identifying polypeptides and nucleic acid sequences acting together in the same biological process. Genetics can assign function to a gene by demonstrating that DNA lesions (mutations) in the gene have a quantifiable effect on the organism, including, but not limited to, its development; hormone biosynthesis and response; growth and growth habit (plant architecture); mRNA expression profiles; polypeptide expression profiles; ability to resist diseases; tolerance of abiotic stresses (for example, drought conditions); ability to acquire nutrients; photosynthetic efficiency; altered primary and secondary metabolism; and the composition of various plant organs. Biochemistry can assign function by demonstrating that the polypeptide(s) encoded by the gene, typically when expressed in a heterologous organism, possesses a certain enzymatic activity, either alone or in combination with other polypeptides. Molecular genetics can assign function by overexpressing or underexpressing the gene in the native plant or in heterologous organisms, and observing quantifiable effects as disclosed in functional assignment by genetics above. In functional genomics, any or all of these approaches are utilized, often in concert, to assign functions to genes across any of a number of organismal phenotypes.

[0055] It is recognized by those skilled in the art that these different methodologies can each provide data as evidence for the function of a particular gene, and that such evidence is stronger with increasing amounts of data used for functional assignment: in one embodiment from a single methodology, in another embodiment from two methodologies, and in still another embodiment from more than two methodologies. In addition, those skilled in the art are aware that different methodologies can differ in the strength of the evidence provided for the assignment of gene function. Typically, but not always, a datum of biochemical, genetic, or molecular genetic evidence is considered stronger than a datum of bioinformatic or gene expression evidence. Finally, those skilled in the art recognize that, for different genes, a single datum from a single methodology can differ in terms of the strength of the evidence provided by each distinct datum for the assignment of the function of these different genes.

[0056] The objective of crop trait functional genomics is to identify crop trait genes of interest, for example, genes capable of conferring useful agronomic traits in crop plants. Such agronomic traits include, but are not limited to, enhanced yield, whether in quantity or quality; enhanced nutrient acquisition and metabolic efficiency; enhanced or altered nutrient composition of plant tissues used for food, feed, fiber, or processing; enhanced utility for agricultural or industrial processing; enhanced resistance to plant diseases; enhanced tolerance of adverse environmental conditions (abiotic stresses) including, but not limited to, drought, excessive cold, excessive heat, or excessive soil salinity or extreme acidity or alkalinity; and alterations in plant architecture or development, including changes in developmental timing. The deployment of such identified trait genes by either transgenic or non-transgenic means can materially improve crop plants for the benefit of agriculture.

[0057] Cereals are the most important crop plants on the planet in terms of both human and animal consumption. Genomic synteny (conservation of gene order within large chromosomal segments) is observed in rice, maize, wheat, barley, rye, oats, and other agriculturally important monocots, which facilitates the mapping and isolation of orthologous genes from diverse cereal species based on the sequence of a single cereal gene. Rice has the smallest (about 420 Mb) genome among the cereal grains, and has recently been a major focus of public and private genomic and EST sequencing efforts. See Goff et al., 2002.

II. Definitions

[0058] Unless otherwise defined, all technical and scientific terms used herein have the same meaning as commonly understood by one of ordinary skill in the art to which the presently disclosed subject matter pertains. For clarity of the present specification, certain definitions are presented hereinbelow.

[0059] Following long-standing patent law convention, the terms “a” and “an” mean “one or more” when used in this application, including in the claims.

[0060] As used herein, the term “about”, when referring to a value or to an amount of mass, weight, time, volume, concentration or percentage is meant to encompass variations of ±20% or ±10%, in another example ±5%, in another example ±1%, and in still another example ±0.1% from the specified amount, as such variations are appropriate to practice the presently disclosed subject matter. Unless otherwise indicated, all numbers expressing quantities of ingredients, reaction conditions, and so forth used in the specification and claims are to be understood as being modified in all instances by the term “about”. Accordingly, unless indicated to the contrary, the numerical parameters set forth in this specification and attached claims are approximations that can vary depending upon the desired properties sought to be obtained by the presently disclosed subject matter.

[0061] As used herein, the terms “amino acid” and “amino acid residue” are used interchangeably and refer to any of the twenty naturally occurring amino acids, as well as analogs, derivatives, and congeners thereof; amino acid analogs having variant side chains; and all stereoisomers of any of any of the foregoing. Thus, the term “amino acid” is intended to embrace all molecules, whether natural or synthetic, which include both an amino functionality and an acid functionality and capable of being included in a polymer of naturally occurring amino acids.

[0062] An amino acid is formed upon chemical digestion (hydrolysis) of a polypeptide at its peptide linkages. The amino acid residues described herein are in one embodiment in the “L” isomeric form. However, residues in the “D” isomeric form can be substituted for any L-amino acid residue, as long as the desired functional property is retained by the polypeptide. NH₂ refers to the free amino group present at the amino terminus of a polypeptide. COOH refers to the free carboxy group present at the carboxy terminus of a polypeptide. In keeping with standard polypeptide nomenclature abbreviations for amino acid residues are shown in tabular form presented hereinabove.

[0063] It is noted that all amino acid residue sequences represented herein by formulae have a left-to-right orientation in the conventional direction of amino terminus to carboxy terminus. In addition, the phrases “amino acid” and “amino acid residue” are broadly defined to include modified and unusual amino acids.

[0064] Furthermore, it is noted that a dash at the beginning or end of an amino acid residue sequence indicates a peptide bond to a further sequence of one or more amino acid residues or a covalent bond to an amino-terminal group such as NH₂ or acetyl or to a carboxy-terminal group such as COOH.

[0065] As used herein, the terms “associated with” and “operatively linked” refer to two nucleic acid sequences that are related physically or functionally. For example, a promoter or regulatory DNA sequence is said to be “associated with” a DNA sequence that encodes an RNA or a polypeptide if the two sequences are operatively linked, or situated such that the regulator DNA sequence will affect the expression level of the coding or structural DNA sequence.

[0066] As used herein, the term “chimera” refers to a polypeptide that comprises domains or other features that are derived from different polypeptides or are in a position relative to each other that is not naturally occurring.

[0067] As used herein, the term “chimeric construct” refers to a recombinant nucleic acid molecule in which a promoter or regulatory nucleic acid sequence is operatively linked to, or associated with, a nucleic acid sequence that codes for an mRNA or which is expressed as a polypeptide, such that the regulatory nucleic acid sequence is able to regulate transcription or expression of the associated nucleic acid sequence. The regulatory nucleic acid sequence of the chimeric construct is not normally operatively linked to the associated nucleic acid sequence as found in nature.

[0068] As used herein, the term “co-factor” refers to a natural reactant, such as an organic molecule or a metal ion, required in an enzyme-catalyzed reaction. A co-factor can be, for example, NAD(P), riboflavin (including FAD and FMN), folate, molybdopterin, thiamin, biotin, lipoic acid, pantothenic acid and coenzyme A, S-adenosylmethionine, pyridoxal phosphate, ubiquinone, and menaquinone. In one embodiment, a co-factor can be regenerated and reused.

[0069] As used herein, the terms “coding sequence” and “open reading frame” (ORF) are used interchangeably and refer to a nucleic acid sequence that is transcribed into RNA such as mRNA, rRNA, tRNA, snRNA, sense RNA, or antisense RNA. In one embodiment, the RNA is then translated in vivo or in vitro to produce a polypeptide.

[0070] As used herein, the term “complementary” refers to two nucleotide sequences that comprise antiparallel nucleotide sequences capable of pairing with one another upon formation of hydrogen bonds between the complementary base residues in the antiparallel nucleotide sequences. As is known in the art, the nucleic acid sequences of two complementary strands are the reverse complement of each other when each is viewed in the 5′ to 3′ direction.

[0071] As is also known in the art, two sequences that hybridize to each other under a given set of conditions do not necessarily have to be 100% fully complementary. As used herein, the terms “fully complementary” and “100% complementary” refer to sequences for which the complementary regions are 100% in Watson-Crick base-pairing, i.e., that no mismatches occur within the complementary regions. However, as is often the case with recombinant molecules (for example, cDNAs) that are cloned into cloning vectors, certain of these molecules can have non-complementary overhangs on either the 5′ or 3′ ends that result from the cloning event. In such a situation, it is understood that the region of 100% or full complementarity excludes any sequences that are added to the recombinant molecule (typically at the ends) solely as a result of, or to facilitate, the cloning event. Such sequences are, for example, polylinker sequences, linkers with restriction enzyme recognition sites, etc.

[0072] As used herein, the terms “domain” and “feature”, when used in reference to a polypeptide or amino acid sequence, refers to a subsequence of an amino acid sequence that has a particular biological function. Domains and features that have a particular biological function include, but are not limited to, ligand binding, nucleic acid binding, catalytic activity, substrate binding, and polypeptide-polypeptide interacting domains. Similarly, when used herein in reference to a nucleic acid sequence, a “domain”, or “feature” is that subsequence of the nucleic acid sequence that encodes a domain or feature of a polypeptide.

[0073] As used herein, the term “enzyme activity” refers to the ability of an enzyme to catalyze the conversion of a substrate into a product. A substrate for the enzyme can comprise the natural substrate of the enzyme but also can comprise analogues of the natural substrate, which can also be converted by the enzyme into a product or into an analogue of a product. The activity of the enzyme is measured for example by determining the amount of product in the reaction after a certain period of time, or by determining the amount of substrate remaining in the reaction mixture after a certain period of time. The activity of the enzyme can also be measured by determining the amount of an unused co-factor of the reaction remaining in the reaction mixture after a certain period of time or by determining the amount of used co-factor in the reaction mixture after a certain period of time. The activity of the enzyme can also be measured by determining the amount of a donor of free energy or energy-rich molecule (e.g., ATP, phosphoenolpyruvate, acetyl phosphate, or phosphocreatine) remaining in the reaction mixture after a certain period of time or by determining the amount of a used donor of free energy or energy-rich molecule (e.g., ADP, pyruvate, acetate, or creatine) in the reaction mixture after a certain period of time.

[0074] As used herein, the term “expression cassette” refers to a nucleic acid molecule capable of directing expression of a particular nucleotide sequence in an appropriate host cell, comprising a promoter operatively linked to the nucleotide sequence of interest which is operatively linked to termination signals. It also typically comprises sequences required for proper translation of the nucleotide sequence. The coding region usually encodes a polypeptide of interest but can also encode a functional RNA of interest, for example antisense RNA or a non-translated RNA, in the sense or antisense direction. The expression cassette comprising the nucleotide sequence of interest can be chimeric, meaning that at least one of its components is heterologous with respect to at least one of its other components. The expression cassette can also be one that is naturally occurring but has been obtained in a recombinant form useful for heterologous expression. Typically, however, the expression cassette is heterologous with respect to the host; i.e., the particular DNA sequence of the expression cassette does not occur naturally in the host cell and was introduced into the host cell or an ancestor of the host cell by a transformation event. The expression of the nucleotide sequence in the expression cassette can be under the control of a constitutive promoter or of an inducible promoter that initiates transcription only when the host cell is exposed to some particular external stimulus. In the case of a multicellular organism such as a plant, the promoter can also be specific to a particular tissue, organ, or stage of development.

[0075] As used herein, the term “fragment” refers to a sequence that comprises a subset of another sequence. When used in the context of a nucleic acid or amino acid sequence, the terms “fragment” and “subsequence” are used interchangeably. A fragment of a nucleic acid sequence can be any number of nucleotides that is less than that found in another nucleic acid sequence, and thus includes, but is not limited to, the sequences of an exon or intron, a promoter, an enhancer, an origin of replication, a 5′ or 3′ untranslated region, a coding region, and a polypeptide binding domain. It is understood that a fragment or subsequence can also comprise less than the entirety of a nucleic acid sequence, for example, a portion of an exon or intron, promoter, enhancer, etc. Similarly, a fragment or subsequence of an amino acid sequence can be any number of residues that is less than that found in a naturally occurring polypeptide, and thus includes, but is not limited to, domains, features, repeats, etc. Also similarly, it is understood that a fragment or subsequence of an amino acid sequence need not comprise the entirety of the amino acid sequence of the domain, feature, repeat, etc. A fragment can also be a “functional fragment”, in which the fragment retains a specific biological function of the nucleic acid sequence or amino acid sequence of interest. For example, a functional fragment of a transcription factor can include, but is not limited to, a DNA binding domain, a transactivating domain, or both. Similarly, a functional fragment of a receptor tyrosine kinase includes, but is not limited to a ligand binding domain, a kinase domain, an ATP binding domain, and combinations thereof.

[0076] As used herein, the term “gene” refers to a nucleic acid that encodes an RNA, for example, nucleic acid sequences including, but not limited to, structural genes encoding a polypeptide. The target gene can be a gene derived from a cell, an endogenous gene, a transgene, or exogenous genes such as genes of a pathogen, for example a virus, which is present in the cell after infection thereof. The cell containing the target gene can be derived from or contained in any organism, for example a plant, animal, protozoan, virus, bacterium, or fungus. The term “gene” also refers broadly to any segment of DNA associated with a biological function. As such, the term “gene” encompasses sequences including but not limited to a coding sequence, a promoter region, a transcriptional regulatory sequence, a non-expressed DNA segment that is a specific recognition sequence for regulatory proteins, a non-expressed DNA segment that contributes to gene expression, a DNA segment designed to have desired parameters, or combinations thereof. A gene can be obtained by a variety of methods, including cloning from a biological sample, synthesis based on known or predicted sequence information, and recombinant derivation from one or more existing sequences.

[0077] As is understood in the art, a gene comprises a coding strand and a non-coding strand. As used herein, the terms “coding strand” and “sense strand” are used interchangeably, and refer to a nucleic acid sequence that has the same sequence of nucleotides as an mRNA from which the gene product is translated. As is also understood in the art, when the coding strand and/or sense strand is used to refer to a DNA molecule, the coding/sense strand includes thymidine residues instead of the uridine residues found in the corresponding mRNA. Additionally, when used to refer to a DNA molecule, the coding/sense strand can also include additional elements not found in the mRNA including, but not limited to promoters, enhancers, and introns. Similarly, the terms “template strand” and “antisense strand” are used interchangeably and refer to a nucleic acid sequence that is complementary to the coding/sense strand.

[0078] As used herein, the terms “complementarity” and “complementary” refer to a nucleic acid that can form one or more hydrogen bonds with another nucleic acid sequence by either traditional Watson-Crick or other non-traditional types of interactions. In reference to the nucleic molecules of the presently disclosed subject matter, the binding free energy for a nucleic acid molecule with its complementary sequence is sufficient to allow the relevant function of the nucleic acid to proceed, in one embodiment, RNAi activity. For example, the degree of complementarity between the sense and antisense strands of the siRNA construct can be the same or different from the degree of complementarity between the antisense strand of the siRNA and the target nucleic acid sequence. Complementarity to the target sequence of less than 100% in the antisense strand of the siRNA duplex, including point mutations, is not well tolerated when these changes are located between the 3′-end and the middle of the antisense siRNA, whereas mutations near the 5′-end of the antisense siRNA strand can exhibit a small degree of RNAi activity (Elbashir et al., 2001c). Determination of binding free energies for nucleic acid molecules is well known in the art. See e.g., Freier et al., 1986; Turner et al., 1987.

[0079] As used herein, the phrase “percent complementarity” refers to the percentage of contiguous residues in a nucleic acid molecule that can form hydrogen bonds (e.g., Watson-Crick base pairing) with a second nucleic acid sequence (e.g., 5, 6, 7, 8, 9, 10 out of 10 being 50%, 60%, 70%, 80%, 90%, and 100% complementary). The terms “100% complementary”, “fully complementary”, and “perfectly complementary” indicate that all of the contiguous residues of a nucleic acid sequence can hydrogen bond with the same number of contiguous residues in a second nucleic acid sequence.

[0080] The term “gene expression” generally refers to the cellular processes by which a biologically active polypeptide is produced from a DNA sequence and exhibits a biological activity in a cell. As such, gene expression involves the processes of transcription and translation, but also involves post-transcriptional and post-translational processes that can influence a biological activity of a gene or gene product. These processes include, but are not limited to RNA syntheses, processing, and transport, as well as polypeptide synthesis, transport, and post-translational modification of polypeptides. Additionally, processes that affect protein-protein interactions within the cell can also affect gene expression as defined herein.

[0081] The terms “heterologous”, “recombinant”, and “exogenous”, when used herein to refer to a nucleic acid sequence (e.g., a DNA sequence) or a gene, refer to a sequence that originates from a source foreign to the particular host cell or, if from the same source, is modified from its original form. Thus, a heterologous gene in a host cell includes a gene that is endogenous to the particular host cell but has been modified through, for example, the use of DNA shuffling or other recombinant techniques (for example, cloning the gene into a vector). The terms also include non-naturally occurring multiple copies of a naturally occurring DNA sequence. Thus, the terms refer to a DNA segment that is foreign or heterologous to the cell, or homologous to the cell but in a position or form within the host cell in which the element is not ordinarily found. Similarly, when used in the context of a polypeptide or amino acid sequence, an exogenous polypeptide or amino acid sequence is a polypeptide or amino acid sequence that originates from a source foreign to the particular host cell or, if from the same source, is modified from its original form. Thus, exogenous DNA segments can be expressed to yield exogenous polypeptides.

[0082] A “homologous” nucleic acid (or amino acid) sequence is a nucleic acid (or amino acid) sequence naturally associated with a host cell into which it is introduced.

[0083] As used herein, the terms “host cells” and “recombinant host cells” are used interchangeably and refer cells (for example, plant cells) into which the compositions of the presently disclosed subject matter (for example, an expression vector) can be introduced. Furthermore, the terms refer not only to the particular plant cell into which an expression construct is initially introduced, but also to the progeny or potential progeny of such a cell. Because certain modifications can occur in succeeding generations due to either mutation or environmental influences, such progeny might not, in fact, be identical to the parent cell, but are still included within the scope of the term as used herein.

[0084] The phrase “hybridizing specifically to” refers to the binding, duplexing, or hybridizing of a molecule only to a particular nucleotide sequence under stringent conditions when that sequence is present in a complex mixture (e.g., total cellular) DNA or RNA. The phrase “bind(s) substantially” refers to complementary hybridization between a probe nucleic acid and a target nucleic acid and embraces minor mismatches that can be accommodated by reducing the stringency of the hybridization media to achieve the desired detection of the target nucleic acid sequence.

[0085] As used herein, the term “inhibitor” refers to a chemical substance that inactivates or decreases the biological activity of a polypeptide such as a biosynthetic and catalytic activity, receptor, signal transduction polypeptide, structural gene product, or transport polypeptide. The term “herbicide” (or “herbicidal compound”) is used herein to define an inhibitor applied to a plant at any stage of development, whereby the herbicide inhibits the growth of the plant or kills the plant.

[0086] An “isolated” nucleic acid molecule or protein, or biologically active portion thereof, is substantially free of other cellular material, or culture medium when produced by recombinant techniques, or substantially free of chemical precursors or other chemicals when chemically synthesized. Thus, the term “isolated nucleic acid” refers to a polynucleotide of genomic, cDNA, or synthetic origin or some combination thereof, which (1) is not associated with the cell in which the “isolated nucleic acid” is found in nature, or (2) is operatively linked to a polynucleotide to which it is not linked in nature. Similarly, the term “isolated polypeptide” refers to a polypeptide, in certain embodiments prepared from recombinant DNA or RNA, or of synthetic origin, or some combination thereof, which (1) is not associated with proteins that it is normally found with in nature, (2) is isolated from the cell in which it normally occurs, (3) is isolated free of other proteins from the same cellular source, (4) is expressed by a cell from a different species, or (5) does not occur in nature.

[0087] In certain embodiments, an “isolated” nucleic acid is free of sequences (e.g., protein encoding or regulatory sequences) that naturally flank the nucleic acid (i.e., sequences located at the 5′ and 3′ ends of the nucleic acid) in the genomic DNA of the organism from which the nucleic acid is derived. For example, in various embodiments, the isolated nucleic acid molecule can contain less than about 5 kb, 4 kb, 3 kb, 2 kb, 1 kb, 0.5 kb, or 0.1 kb of the nucleotide sequences that naturally flank the nucleic acid molecule in genomic DNA of the cell from which the nucleic acid is derived. A protein that is substantially free of cellular material includes preparations of protein or polypeptide having less than about 30%, 20%, 10%, or 5%, (by dry weight) of contaminating protein. When the protein of the presently disclosed subject matter, or biologically active portion thereof, is recombinantly produced, culture medium represents less than about 30%, 20%, 10%, or 5% (by dry weight) of chemical precursors or non-protein of interest chemicals. Thus, the term “isolated”, when used in the context of an isolated DNA molecule or an isolated polypeptide, refers to a DNA molecule or polypeptide that, by the hand of man, exists apart from its native environment and is therefore not a product of nature. An isolated DNA molecule or polypeptide can exist in a purified form or can exist in a non-native environment such as, for example, in a transgenic host cell.

[0088] The term “isolated”, when used in the context of an “isolated cell”, refers to a cell that has been removed from its natural environment, for example, as a part of an organ, tissue, or organism.

[0089] As used herein, the term “mature polypeptide” refers to a polypeptide from which the transit peptide, signal peptide, and/or propeptide portions have been removed.

[0090] As used herein, the term “minimal promoter” refers to the smallest piece of a promoter, such as a TATA element, that can support any transcription. A minimal promoter typically has greatly reduced promoter activity in the absence of upstream or downstream activation. In the presence of a suitable transcription factor, a minimal promoter can function to permit transcription.

[0091] As used herein, the term “modified enzyme activity” refers to enzyme activity that is different from that which naturally occurs in a plant (i.e. enzyme activity that occurs naturally in the absence of direct or indirect manipulation of such activity by man). In one embodiment, a modified enzyme activity is displayed by a non-naturally occurring enzyme that is tolerant to inhibitors that inhibit the cognate naturally occurring enzyme activity.

[0092] As used herein, the term “modulate” refers to an increase, decrease, or other alteration of any, or all, chemical and biological activities or properties of a biochemical entity, e.g., a wild-type or mutant nucleic acid molecule. As such, the term “modulate” can refer to a change in the expression level of a gene, or a level of RNA molecule or equivalent RNA molecules encoding one or more proteins or protein subunits, or activity of one or more proteins or protein subunits is up regulated or down regulated, such that expression, level, or activity is greater than or less than that observed in the absence of the modulator. For example, the term “modulate” can mean “inhibit” or “suppress”, but the use of the word “modulate” is not limited to this definition.

[0093] As used herein, the terms “inhibit”, “suppress”, “down regulate”, and grammatical variants thereof are used interchangeably and refer to an activity whereby gene expression or a level of an RNA encoding one or more gene products is reduced below that observed in the absence of a nucleic acid molecule of the presently disclosed subject matter. In one embodiment, inhibition with a nucleic acid molecule (for example, a dsRNA, an antisense RNA, or an siRNA) results in a decrease in the steady state level of a target RNA. In another embodiment, inhibition with a a nucleic acid molecule (for example, a dsRNA, an antisense RNA, or an siRNA) results in an expression level of a target gene that is below that level observed in the presence of an inactive or attenuated molecule that is unable to mediate an RNAi response. In another embodiment, inhibition of gene expression with a nucleic acid molecule (for example, a dsRNA, an antisense RNA, or an siRNA) of the presently disclosed subject matter is greater in the presence of the a nucleic acid molecule than in its absence. In still another embodiment, inhibition of gene expression is associated with an enhanced rate of degradation of the mRNA encoded by the gene (for example, by RNAi mediated by an siRNA, a dsRNA, or an antisense RNA).

[0094] The term “modulation” as used herein refers to both upregulation (i.e., activation or stimulation) and downregulation (i.e., inhibition or suppression) of a response. Thus, the term “modulation”, when used in reference to a functional property or biological activity or process (e.g., enzyme activity or receptor binding), refers to the capacity to upregulate (e.g., activate or stimulate), downregulate (e.g., inhibit or suppress), or otherwise change a quality of such property, activity, or process. In certain instances, such regulation can be contingent on the occurrence of a specific event, such as activation of a signal transduction pathway, and/or can be manifest only in particular cell types.

[0095] The term “modulator” refers to a polypeptide, nucleic acid, macromolecule, complex, molecule, small molecule, compound, species, or the like (naturally occurring or non-naturally occurring), or an extract made from biological materials such as bacteria, plants, fungi, or animal cells or tissues, that can be capable of causing modulation. Modulators can be evaluated for potential activity as inhibitors or activators (directly or indirectly) of a functional property, biological activity or process, or combination of them, (e.g., agonist, partial antagonist, partial agonist, inverse agonist, antagonist, anti-microbial agents, inhibitors of microbial infection or proliferation, and the like) by inclusion in assays. In such assays, many modulators can be screened at one time. The activity of a modulator can be known, unknown, or partially known.

[0096] Modulators can be either selective or non-selective. As used herein, the term “selective” when used in the context of a modulator (e.g., an inhibitor) refers to a measurable or otherwise biologically relevant difference in the way the modulator interacts with one molecule (e.g., a gene of interest) versus another similar but not identical molecule (e.g., a member of the same gene family as the gene of interest).

[0097] It must be understood that it is not required that the degree to which the interactions differ be completely opposite. Put another way, the term selective modulator encompasses not only those molecules that only bind to mRNA transcripts from a gene of interest and not those of related family members. The term is also intended to include modulators that are characterized by interactions with transcripts from genes of interest and from related family members that differ to a lesser degree. For example, selective modulators include modulators for which conditions can be found (such as the degree of sequence identity) that would allow a biologically relevant difference in the binding of the modulator to transcripts form the gene of interest versus transcripts from related genes.

[0098] When a selective modulator is identified, the modulator will bind to one molecule (for example an mRNA transcript of a gene of interest) in a manner that is different (for example, stronger) than it binds to another molecule (for example, an mRNA transcript of a gene related to the gene of interest). As used herein, the modulator is said to display “selective binding” or “preferential binding” to the molecule to which it binds more strongly.

[0099] As used herein, the term “mutation” carries its traditional connotation and refers to a change, inherited, naturally occurring or introduced, in a nucleic acid or polypeptide sequence, and is used in its sense as generally known to those of skill in the art.

[0100] As used herein, the term “native” refers to a gene that is naturally present in the genome of an untransformed plant cell. Similarly, when used in the context of a polypeptide, a “native polypeptide” is a polypeptide that is encoded by a native gene of an untransformed plant cell's genome.

[0101] As used herein, the term “naturally occurring” refers to an object that is found in nature as distinct from being artificially produced by man. For example, a polypeptide or nucleotide sequence that is present in an organism (including a virus) in its natural state, which has not been intentionally modified or isolated by man in the laboratory, is naturally occurring. As such, a polypeptide or nucleotide sequence is considered “non-naturally occurring” if it is encoded by or present within a recombinant molecule, even if the amino acid or nucleic acid sequence is identical to an amino acid or nucleic acid sequence found in nature.

[0102] As used herein, the terms “nucleic acid” and “nucleic acid molecule” refer to any of deoxyribonucleic acid (DNA), ribonucleic acid (RNA), oligonucleotides, fragments generated by the polymerase chain reaction (PCR), and fragments generated by any of ligation, scission, endonuclease action, and exonuclease action. Nucleic acids can be composed of monomers that are naturally occurring nucleotides (such as deoxyribonucleotides and ribonucleotides), or analogs of naturally occurring nucleotides (e.g., α-enantiomeric forms of naturally occurring nucleotides), or a combination of both. Modified nucleotides can have modifications in sugar moieties and/or in pyrimidine or purine base moieties. Sugar modifications include, for example, replacement of one or more hydroxyl groups with halogens, alkyl groups, amines, and azido groups, or sugars can be functionalized as ethers or esters. Moreover, the entire sugar moiety can be replaced with sterically and electronically similar structures, such as aza-sugars and carbocyclic sugar analogs. Examples of modifications in a base moiety include alkylated purines and pyrimidines, acylated purines or pyrimidines, or other well-known heterocyclic substitutes. Nucleic acid monomers can be linked by phosphodiester bonds or analogs of such linkages. Analogs of phosphodiester linkages include phosphorothioate, phosphorodithioate, phosphoroselenoate, phosphorodiselenoate, phosphoroanilothioate, phosphoranilidate, phosphoramidate, and the like. The term “nucleic acid” also includes so-called “peptide nucleic acids”, which comprise naturally occurring or modified nucleic acid bases attached to a polyamide backbone. Nucleic acids can be either single stranded or double stranded.

[0103] The term “operatively linked”, when describing the relationship between two nucleic acid regions, refers to a juxtaposition wherein the regions are in a relationship permitting them to function in their intended manner. For example, a control sequence “operatively linked” to a coding sequence is ligated in such a way that expression of the coding sequence is achieved under conditions compatible with the control sequences, such as when the appropriate molecules (e.g., inducers and polymerases) are bound to the control or regulatory sequence(s). Thus, in one embodiment, the phrase “operatively linked” refers to a promoter connected to a coding sequence in such a way that the transcription of that coding sequence is controlled and regulated by that promoter. Techniques for operatively linking a promoter to a coding sequence are well known in the art; the precise orientation and location relative to a coding sequence of interest is dependent, inter alia, upon the specific nature of the promoter.

[0104] Thus, the term “operatively linked” can refer to a promoter region that is connected to a nucleotide sequence in such a way that the transcription of that nucleotide sequence is controlled and regulated by that promoter region. Similarly, a nucleotide sequence is said to be under the “transcriptional control” of a promoter to which it is operatively linked. Techniques for operatively linking a promoter region to a nucleotide sequence are known in the art. The term “operatively linked” can also refer to a transcription termination sequence or other nucleic acid that is connected to a nucleotide sequence in such a way that termination of transcription of that nucleotide sequence is controlled by that transcription termination sequence. Additionally, the term “operatively linked” can refer to a enhancer, silencer, or other nucleic acid regulatory sequence that when operatively linked to an open reading frame modulates the expression of that open reading frame, either in a positive or negative fashion.

[0105] As used herein, the phrase “percent identical”,” in the context of two nucleic acid or polypeptide sequences, refers to two or more sequences or subsequences that have in one embodiment 60%, in another embodiment 70%, in another embodiment 80%, in another embodiment 90%, in another embodiment 95%, and in still another embodiment at least 99% nucleotide or amino acid residue identity, respectively, when compared and aligned for maximum correspondence, as measured using one of the following sequence comparison algorithms or by visual inspection. The percent identity exists in one embodiment over a region of the sequences that is at least about 50 residues in length, in another embodiment over a region of at least about 100 residues, and in another embodiment, the percent identity exists over at least about 150 residues. In still another embodiment, the percent identity exists over the entire length of the sequences.

[0106] For sequence comparison, typically one sequence acts as a reference sequence to which test sequences are compared. When using a sequence comparison algorithm, test and reference sequences are input into a computer, subsequence coordinates are designated if necessary, and sequence algorithm program parameters are designated. The sequence comparison algorithm then calculates the percent sequence identity for the test sequence(s) relative to the reference sequence, based on the designated program parameters.

[0107] Optimal alignment of sequences for comparison can be conducted, for example, by the local homology algorithm disclosed in Smith & Waterman, 1981, by the homology alignment algorithm disclosed in Needleman & Wunsch, 1970, by the search for similarity method disclosed in Pearson & Lipman, 1988, by computerized implementations of these algorithms (GAP, BESTFIT, FASTA, and TFASTA in the GCG Wisconsin Package, available from Accelrys, Inc., San Diego, Calif., United States of America), or by visual inspection. See generally, Ausubel et al., 1988.

[0108] One example of an algorithm that is suitable for determining percent sequence identity and sequence similarity is the BLAST algorithm, which is described in Altschul et al., 1990. Software for performing BLAST analysis is publicly available through the National Center for Biotechnology Information (http://www.ncbi.nlm.nih.gov/). This algorithm involves first identifying high scoring sequence pairs (HSPs) by identifying short words of length W in the query sequence, which either match or satisfy some positive valued threshold score T when aligned with a word of the same length in a database sequence. T is referred to as the neighborhood word score threshold. See generally, Altschul et al., 1990. These initial neighborhood word hits act as seeds for initiating searches to find longer HSPs containing them. The word hits are then extended in both directions along each sequence for as far as the cumulative alignment score can be increased. Cumulative scores are calculated using, for nucleotide sequences, the parameters M (reward score for a pair of matching residues; always >0) and N (penalty score for mismatching residues; always <0). For amino acid sequences, a scoring matrix is used to calculate the cumulative score. Extension of the word hits in each direction are halted when the cumulative alignment score falls off by the quantity X from its maximum achieved value, the cumulative score goes to zero or below due to the accumulation of one or more negative scoring residue alignments, or the end of either sequence is reached. The BLAST algorithm parameters W, T, and X determine the sensitivity and speed of the alignment. The BLASTN program (for nucleotide sequences) uses as defaults a wordlength (W) of 11, an expectation (E) of 10, a cutoff of 100, M=5, N=4, and a comparison of both strands. For amino acid sequences, the BLASTP program uses as defaults a wordlength (W) of 3, an expectation (E) of 10, and the BLOSUM62 scoring matrix. See Henikoff & Henikoff, 1992.

[0109] In addition to calculating percent sequence identity, the BLAST algorithm also performs a statistical analysis of the similarity between two sequences (see e.g., Karlin & Altschul, 1993). One measure of similarity provided by the BLAST algorithm is the smallest sum probability (P(N)), which provides an indication of the probability by which a match between two nucleotide or amino acid sequences would occur by chance. For example, a test nucleic acid sequence is considered similar to a reference sequence if the smallest sum probability in a comparison of the test nucleic acid sequence to the reference nucleic acid sequence is in one embodiment less than about 0.1, in another embodiment less than about 0.01, and in still another embodiment less than about 0.001.

[0110] The phrase “hybridizing substantially to” refers to complementary hybridization between a probe nucleic acid molecule and a target nucleic acid molecule and embraces minor mismatches (for example, polymorphisms) that can be accommodated by reducing the stringency of the hybridization and/or wash media to achieve the desired hybridization.

[0111] “Stringent hybridization conditions” and “stringent hybridization wash conditions” in the context of nucleic acid hybridization experiments such as Southern and Northern blot analysis are both sequence- and environment-dependent. Longer sequences hybridize specifically at higher temperatures. An extensive guide to the hybridization of nucleic acids is found in Tijssen, 1993. Generally, high stringency hybridization and wash conditions are selected to be about 5° C. lower than the thermal melting point (Tₘ) for the specific sequence at a defined ionic strength and pH. Typically, under “highly stringent conditions” a probe will hybridize specifically to its target subsequence, but to no other sequences. Similarly, medium stringency hybridization and wash conditions are selected to be more than about 5° C. lower than the Tₘ for the specific sequence at a defined ionic strength and pH. Exemplary medium stringency conditions include hybridizations and washes as for high stringency conditions, except that the temperatures for the hybridization and washes are in one embodiment 8° C., in another embodiment 10° C., in another embodiment 12° C., and in still another embodiment 15° C. lower than the Tₘ for the specific sequence at a defined ionic strength and pH.

[0112] The Tₘ is the temperature (under defined ionic strength and pH) at which 50% of the target sequence hybridizes to a perfectly matched probe. Very stringent conditions are selected to be equal to the Tₘ for a particular probe. An example of highly stringent hybridization conditions for Southern or Northern Blot analysis of complementary nucleic acids having more than about 100 complementary residues is overnight hybridization in 50% formamide with 1 mg of heparin at 42° C. An example of highly stringent wash conditions is 15 minutes in 0.1× standard saline citrate (SSC), 0.1% (w/v) SDS at 65° C. Another example of highly stringent wash conditions is 15 minutes in 0.2×SSC buffer at 65° C. (see Sambrook and Russell, 2001 for a description of SSC buffer and other stringency conditions). Often, a high stringency wash is preceded by a lower stringency wash to remove background probe signal. An example of medium stringency wash conditions for a duplex of more than about 100 nucleotides is 15 minutes in 1×SSC at 45° C. Another example of medium stringency wash for a duplex of more than about 100 nucleotides is 15 minutes in 4-6×SSC at 40° C. For short probes (e.g., about 10 to 50 nucleotides), stringent conditions typically involve salt concentrations of less than about 1M Na+ ion, typically about 0.01 to 1M Na+ ion concentration (or other salts) at pH 7.0-8.3, and the temperature is typically at least about 30° C. Stringent conditions can also be achieved with the addition of destabilizing agents such as formamide. In general, a signal to noise ratio of 2-fold (or higher) than that observed for an unrelated probe in the particular hybridization assay indicates detection of a specific hybridization.

[0113] The following are examples of hybridization and wash conditions that can be used to clone homologous nucleotide sequences that are substantially similar to reference nucleotide sequences of the presently disclosed subject matter: a probe nucleotide sequence hybridizes in one example to a target nucleotide sequence in 7% sodium dodecyl sulfate (NaDS), 0.5M NaPO4, 1 mm ethylene diamine tetraacetic acid (EDTA) at 50° C. followed by washing in 2×SSC, 0.1% NaDS at 50° C.; in another example, a probe and target sequence hybridize in 7% NaDS, 0.5 M NaPO4, 1 mm EDTA at 50° C. followed by washing in 1×SSC, 0.1% NaDS at 50° C.; in another example, a probe and target sequence hybridize in 7% NaDS, 0.5 M NaPO4, 1 mm EDTA at 50° C. followed by washing in 0.5×SSC, 0.1% NaDS at 50° C.; in another example, a probe and target sequence hybridize in 7% NaDS, 0.5 M NaPO4, 1 mm EDTA at 50° C. followed by washing in 0.1×SSC, 0.1% NaDS at 50° C.; in yet another example, a probe and target sequence hybridize in 7% NaDS, 0.5 M NaPO4, 1 mm EDTA at 50° C. followed by washing in 0.1×SSC, 0.1% NaDS at 65° C. In one embodiment, hybridization conditions comprise hybridization in a roller tube for at least 12 hours at 42° C.

[0114] The term “phenotype” refers to the entire physical, biochemical, and physiological makeup of a cell or an organism, e.g., having any one trait or any group of traits. As such, phenotypes result from the expression of genes within a cell or an organism, and relate to traits that are potentially observable or assayable.

[0115] As used herein, the terms “polypeptide”, “protein”, and “peptide”, which are used interchangeably herein, refer to a polymer of the 20 protein amino acids, or amino acid analogs, regardless of its size or function. Although “protein” is often used in reference to relatively large polypeptides, and “peptide” is often used in reference to small polypeptides, usage of these terms in the art overlaps and varies. The term “polypeptide” as used herein refers to peptides, polypeptides and proteins, unless otherwise noted. As used herein, the terms “protein”, “polypeptide” and “peptide” are used interchangeably herein when referring to a gene product. The term “polypeptide” encompasses proteins of all functions, including enzymes. Thus, exemplary polypeptides include gene products, naturally occurring proteins, homologs, orthologs, paralogs, fragments, and other equivalents, variants and analogs of the foregoing.

[0116] The terms “polypeptide fragment” or “fragment”, when used in reference to a reference polypeptide, refers to a polypeptide in which amino acid residues are deleted as compared to the reference polypeptide itself, but where the remaining amino acid sequence is usually identical to the corresponding positions in the reference polypeptide. Such deletions can occur at the amino-terminus or carboxy-terminus of the reference polypeptide, or alternatively both. Fragments typically are at least 5, 6, 8 or 10 amino acids long, at least 14 amino acids long, at least 20, 30, 40 or 50 amino acids long, at least 75 amino acids long, or at least 100, 150, 200, 300, 500 or more amino acids long. A fragment can retain one or more of the biological activities of the reference polypeptide. In certain embodiments, a fragment can comprise a domain or feature, and optionally additional amino acids on one or both sides of the domain or feature, which additional amino acids can number from 5, 10, 15, 20, 30, 40, 50, or up to 100 or more residues. Further, fragments can include a sub-fragment of a specific region, which sub-fragment retains a function of the region from which it is derived. In another embodiment, a fragment can have immunogenic properties.

[0117] As used herein, the term “pre-polypeptide” refers to a polypeptide that is normally targeted to a cellular organelle, such as a chloroplast, and still comprises a transit peptide.

[0118] As used herein, the term “primer” refers to a sequence comprising in one embodiment two or more deoxyribonucleotides or ribonucleotides, in another embodiment more than three, in another embodiment more than eight, and in yet another embodiment at least about 20 nucleotides of an exonic or intronic region. Such oligonucleotides are in one embodiment between ten and thirty bases in length.

[0119] The term “promoter” or “promoter region” each refers to a nucleotide sequence within a gene that is positioned 5′ to a coding sequence and functions to direct transcription of the coding sequence. The promoter region comprises a transcriptional start site, and can additionally include one or more transcriptional regulatory elements. In one embodiment, a method of the presently disclosed subject matter employs a RNA polymerase III promoter.

[0120] A “minimal promoter” is a nucleotide sequence that has the minimal elements required to enable basal level transcription to occur. As such, minimal promoters are not complete promoters but rather are subsequences of promoters that are capable of directing a basal level of transcription of a reporter construct in an experimental system. Minimal promoters include but are not limited to the CMV minimal promoter, the HSV-tk minimal promoter, the simian virus 40 (SV40) minimal promoter, the human b-actin minimal promoter, the human EF2 minimal promoter, the adenovirus E1B minimal promoter, and the heat shock protein (hsp) 70 minimal promoter. Minimal promoters are often augmented with one or more transcriptional regulatory elements to influence the transcription of an operatively linked gene. For example, cell-type-specific or tissue-specific transcriptional regulatory elements can be added to minimal promoters to create recombinant promoters that direct transcription of an operatively linked nucleotide sequence in a cell-type-specific or tissue-specific manner

[0121] Different promoters have different combinations of transcriptional regulatory elements. Whether or not a gene is expressed in a cell is dependent on a combination of the particular transcriptional regulatory elements that make up the gene's promoter and the different transcription factors that are present within the nucleus of the cell. As such, promoters are often classified as “constitutive”, “tissue-specific”, “cell-type-specific”, or “inducible”, depending on their functional activities in vivo or in vitro. For example, a constitutive promoter is one that is capable of directing transcription of a gene in a variety of cell types. Exemplary constitutive promoters include the promoters for the following genes which encode certain constitutive or “housekeeping” functions: hypoxanthine phosphoribosyl transferase (HPRT), dihydrofolate reductase (DHFR; Scharfmann et al., 1991), adenosine deaminase, phosphoglycerate kinase (PGK), pyruvate kinase, phosphoglycerate mutase, the β-actin promoter (see e.g., Williams et al., 1993), and other constitutive promoters known to those of skill in the art. “Tissue-specific” or “cell-type-specific” promoters, on the other hand, direct transcription in some tissues and cell types but are inactive in others. Exemplary tissue-specific promoters include those promoters described in more detail hereinbelow, as well as other tissue-specific and cell-type specific promoters known to those of skill in the art.

[0122] When used in the context of a promoter, the term “linked” as used herein refers to a physical proximity of promoter elements such that they function together to direct transcription of an operatively linked nucleotide sequence

[0123] The term “transcriptional regulatory sequence” or “transcriptional regulatory element”, as used herein, each refers to a nucleotide sequence within the promoter region that enables responsiveness to a regulatory transcription factor. Responsiveness can encompass a decrease or an increase in transcriptional output and is mediated by binding of the transcription factor to the DNA molecule comprising the transcriptional regulatory element. In one embodiment, a transcriptional regulatory sequence is a transcription termination sequence, alternatively referred to herein as a transcription termination signal.

[0124] The term “transcription factor” generally refers to a protein that modulates gene expression by interaction with the transcriptional regulatory element and cellular components for transcription, including RNA Polymerase, Transcription Associated Factors (TAFs), chromatin-remodeling proteins, and any other relevant protein that impacts gene transcription.

[0125] As used herein, “significance” or “significant” relates to a statistical analysis of the probability that there is a non-random association between two or more entities. To determine whether or not a relationship is “significant” or has “significance”, statistical manipulations of the data can be performed to calculate a probability, expressed as a “p-value”. Those p-values that fall below a user-defined cutoff point are regarded as significant. In one example, a p-value less than or equal to 0.05, in another example less than 0.01, in another example less than 0.005, and in yet another example less than 0.001, are regarded as significant.

[0126] The term “purified” refers to an object species that is the predominant species present (i.e., on a molar basis it is more abundant than any other individual species in the composition). A “purified fraction” is a composition wherein the object species comprises at least about 50 percent (on a molar basis) of all species present. In making the determination of the purity of a species in solution or dispersion, the solvent or matrix in which the species is dissolved or dispersed is usually not included in such determination; instead, only the species (including the one of interest) dissolved or dispersed are taken into account. Generally, a purified composition will have one species that comprises more than about 80 percent of all species present in the composition, more than about 85%, 90%, 95%, 99% or more of all species present. The object species can be purified to essential homogeneity (contaminant species cannot be detected in the composition by conventional detection methods) wherein the composition consists essentially of a single species. A skilled artisan can purify a polypeptide of the presently disclosed subject matter using standard techniques for protein purification in light of the teachings herein. Purity of a polypeptide can be determined by a number of methods known to those of skill in the art, including for example, amino-terminal amino acid sequence analysis, gel electrophoresis, and mass-spectrometry analysis.

[0127] A “reference sequence” is a defined sequence used as a basis for a sequence comparison. A reference sequence can be a subset of a larger sequence, for example, as a segment of a full-length nucleotide or amino acid sequence, or can comprise a complete sequence. Generally, when used to refer to a nucleotide sequence, a reference sequence is at least 200, 300 or 400 nucleotides in length, frequently at least 600 nucleotides in length, and often at least 800 nucleotides in length. Because two proteins can each (1) comprise a sequence (i.e., a portion of the complete protein sequence) that is similar between the two proteins, and (2) can further comprise a sequence that is divergent between the two proteins, sequence comparisons between two (or more) proteins are typically performed by comparing sequences of the two proteins over a “comparison window” (defined hereinabove) to identify and compare local regions of sequence similarity.

[0128] The term “regulatory sequence” is a generic term used throughout the specification to refer to polynucleotide sequences, such as initiation signals, enhancers, regulators, promoters, and termination sequences, which are necessary or desirable to affect the expression of coding and non-coding sequences to which they are operatively linked. Exemplary regulatory sequences are described in Goeddel, 1990, and include, for example, the early and late promoters of simian virus 40 (SV40), adenovirus or cytomegalovirus immediate early promoter, the lac system, the trp system, the TAC or TRC system, T7 promoter whose expression is directed by T7 RNA polymerase, the major operator and promoter regions of phage lambda, the control regions for fd coat protein, the promoter for 3-phosphoglycerate kinase or other glycolytic enzymes, the promoters of acid phosphatase, e.g., Pho5, the promoters of the yeast a-mating factors, the polyhedron promoter of the baculovirus system and other sequences known to control the expression of genes of prokaryotic or eukaryotic cells or their viruses, and various combinations thereof. The nature and use of such control sequences can differ depending upon the host organism. In prokaryotes, such regulatory sequences generally include promoter, ribosomal binding site, and transcription termination sequences. The term “regulatory sequence” is intended to include, at a minimum, components whose presence can influence expression, and can also include additional components whose presence is advantageous, for example, leader sequences and fusion partner sequences.

[0129] In certain embodiments, transcription of a polynucleotide sequence is under the control of a promoter sequence (or other regulatory sequence) that controls the expression of the polynucleotide in a cell-type in which expression is intended. It will also be understood that the polynucleotide can be under the control of regulatory sequences that are the same or different from those sequences which control expression of the naturally occurring form of the polynucleotide.

[0130] The term “reporter gene” refers to a nucleic acid comprising a nucleotide sequence encoding a protein that is readily detectable either by its presence or activity, including, but not limited to, luciferase, fluorescent protein (e.g., green fluorescent protein), chloramphenicol acetyl transferase, β-galactosidase, secreted placental alkaline phosphatase, β-lactamase, human growth hormone, and other secreted enzyme reporters. Generally, a reporter gene encodes a polypeptide not otherwise produced by the host cell, which is detectable by analysis of the cell(s), e.g., by the direct fluorometric, radioisotopic or spectrophotometric analysis of the cell(s) and typically without the need to kill the cells for signal analysis. In certain instances, a reporter gene encodes an enzyme, which produces a change in fluorometric properties of the host cell, which is detectable by qualitative, quantitative, or semiquantitative function or transcriptional activation. Exemplary enzymes include esterases, β-lactamase, phosphatases, peroxidases, proteases (tissue plasminogen activator or urokinase) and other enzymes whose function can be detected by appropriate chromogenic or fluorogenic substrates known to those skilled in the art or developed in the future.

[0131] As used herein, the term “sequencing” refers to determining the ordered linear sequence of nucleic acids or amino acids of a DNA or protein target sample, using conventional manual or automated laboratory techniques.

[0132] As used herein, the term “substantially pure” refers to that the polynucleotide or polypeptide is substantially free of the sequences and molecules with which it is associated in its natural state, and those molecules used in the isolation procedure. The term “substantially free” refers to that the sample is in one embodiment at least 50%, in another embodiment at least 70%, in another embodiment 80% and in still another embodiment 90% free of the materials and compounds with which is it associated in nature.

[0133] As used herein, the term “target cell” refers to a cell, into which it is desired to insert a nucleic acid sequence or polypeptide, or to otherwise effect a modification from conditions known to be standard in the unmodified cell. A nucleic acid sequence introduced into a target cell can be of variable length. Additionally, a nucleic acid sequence can enter a target cell as a component of a plasmid or other vector or as a naked sequence.

[0134] As used herein, the term “transcription” refers to a cellular process involving the interaction of an RNA polymerase with a gene that directs the expression as RNA of the structural information present in the coding sequences of the gene. The process includes, but is not limited to, the following steps: (a) the transcription initiation; (b) transcript elongation; (c) transcript splicing; (d) transcript capping; (e) transcript termination; (f) transcript polyadenylation; (g) nuclear export of the transcript; (h) transcript editing; and (i) stabilizing the transcript.

[0135] As used herein, the term “transcription factor” refers to a cytoplasmic or nuclear protein which binds to a gene, or binds to an RNA transcript of a gene, or binds to another protein which binds to a gene or an RNA transcript or another protein which in turn binds to a gene or an RNA transcript, so as to thereby modulate expression of the gene. Such modulation can additionally be achieved by other mechanisms; the essence of a “transcription factor for a gene” pertains to a factor that alters the level of transcription of the gene in some way.

[0136] The term “transfection” refers to the introduction of a nucleic acid, e.g., an expression vector, into a recipient cell, which in certain instances involves nucleic acid-mediated gene transfer. The term “transformation” refers to a process in which a cell's genotype is changed as a result of the cellular uptake of exogenous nucleic acid. For example, a transformed cell can express a recombinant form of a polypeptide of the presently disclosed subject matter or antisense expression can occur from the transferred gene so that the expression of a naturally occurring form of the gene is disrupted.

[0137] The term “vector” refers to a nucleic acid capable of transporting another nucleic acid to which it has been linked. One type of vector that can be used in accord with the presently disclosed subject matter is an episome, i.e., a nucleic acid capable of extra-chromosomal replication. Other vectors include those capable of autonomous replication and expression of nucleic acids to which they are linked. Vectors capable of directing the expression of genes to which they are operatively linked are referred to herein as “expression vectors”. In general, expression vectors of utility in recombinant DNA techniques are often in the form of plasmids. In the present specification, “plasmid” and “vector” are used interchangeably as the plasmid is the most commonly used form of vector. However, the presently disclosed subject matter is intended to include such other forms of expression vectors which serve equivalent functions and which become known in the art subsequently hereto.

[0138] The term “expression vector” as used herein refers to a DNA sequence capable of directing expression of a particular nucleotide sequence in an appropriate host cell, comprising a promoter operatively linked to the nucleotide sequence of interest which is operatively linked to transcription termination sequences. It also typically comprises sequences required for proper translation of the nucleotide sequence. The construct comprising the nucleotide sequence of interest can be chimeric. The construct can also be one that is naturally occurring but has been obtained in a recombinant form useful for heterologous expression. The nucleotide sequence of interest, including any additional sequences designed to effect proper expression of the nucleotide sequences, can also be referred to as an “expression cassette”.

[0139] The terms “heterologous gene”, “heterologous DNA sequence”, “heterologous nucleotide sequence”, “exogenous nucleic acid molecule”, or “exogenous DNA segment”, as used herein, each refer to a sequence that originates from a source foreign to an intended host cell or, if from the same source, is modified from its original form. Thus, a heterologous gene in a host cell includes a gene that is endogenous to the particular host cell but has been modified, for example by mutagenesis or by isolation from native transcriptional regulatory sequences. The terms also include non-naturally occurring multiple copies of a naturally occurring nucleotide sequence. Thus, the terms refer to a DNA segment that is foreign or heterologous to the cell, or homologous to the cell but in a position within the host cell nucleic acid wherein the element is not ordinarily found.

[0140] Two nucleic acids are “recombined” when sequences from each of the two nucleic acids are combined in a progeny nucleic acid. Two sequences are “directly” recombined when both of the nucleic acids are substrates for recombination. Two sequences are “indirectly recombined” when the sequences are recombined using an intermediate such as a cross over oligonucleotide. For indirect recombination, no more than one of the sequences is an actual substrate for recombination, and in some cases, neither sequence is a substrate for recombination.

[0141] As used herein, the term “regulatory elements” refers to nucleotide sequences involved in controlling the expression of a nucleotide sequence. Regulatory elements can comprise a promoter operatively linked to the nucleotide sequence of interest and termination signals. Regulatory sequences also include enhancers and silencers. They also typically encompass sequences required for proper translation of the nucleotide sequence.

[0142] As used herein, the term “significant increase” refers to an increase in activity (for example, enzymatic activity) that is larger than the margin of error inherent in the measurement technique, in one embodiment an increase by about 2 fold or greater over a baseline activity (for example, the activity of the wild type enzyme in the presence of the inhibitor), in another embodiment an increase by about 5 fold or greater, and in still another embodiment an increase by about 10 fold or greater.

[0143] As used herein, the terms “significantly less” and “significantly reduced” refer to a result (for example, an amount of a product of an enzymatic reaction) that is reduced by more than the margin of error inherent in the measurement technique, in one embodiment a decrease by about 2 fold or greater with respect to a baseline activity (for example, the activity of the wild type enzyme in the absence of the inhibitor), in another embodiment, a decrease by about 5 fold or greater, and in still another embodiment a decrease by about 10 fold or greater.

[0144] As used herein, the terms “specific binding” and “immunological cross-reactivity” refer to an indicator that two molecules are substantially similar. An indication that two nucleic acid sequences or polypeptides are substantially similar is that the polypeptide encoded by the first nucleic acid is immunologically cross reactive with, or specifically binds to, the polypeptide encoded by the second nucleic acid. Thus, a polypeptide is typically substantially similar to a second polypeptide, for example, where the two polypeptides differ only by conservative substitutions.

[0145] The phrase “specifically (or selectively) binds to an antibody,” or “specifically (or selectively) immunoreactive with,” when referring to a polypeptide or peptide, refers to a binding reaction which is determinative of the presence of the polypeptide in the presence of a heterogeneous population of polypeptides and other biologics. Thus, under designated immunoassay conditions, the specified antibodies bind to a particular polypeptide and do not bind in a significant amount to other polypeptides present in the sample. Specific binding to an antibody under such conditions can require an antibody that is selected for its specificity for a particular polypeptide. For example, antibodies raised to the polypeptide with the amino acid sequence encoded by any of the nucleic acid sequences of the presently disclosed subject matter can be selected to obtain antibodies specifically immunoreactive with that polypeptide and not with other polypeptides except for polymorphic variants. A variety of immunoassay formats can be used to select antibodies specifically immunoreactive with a particular polypeptide. For example, solid phase ELISA immunoassays, Western blots, or immunohistochemistry are routinely used to select monoclonal antibodies specifically immunoreactive with a polypeptide. See Harlow & Lane, 1988, for a description of immunoassay formats and conditions that can be used to determine specific immunoreactivity. Typically a specific or selective reaction will be at least twice background signal or noise and more typically more than 10 to 100 times background.

[0146] As used herein, the term “subsequence” refers to a sequence of nucleic acids or amino acids that comprises a part of a longer sequence of nucleic acids or amino acids (e.g., polypeptide), respectively.

[0147] As used herein, the term “substrate” refers to a molecule that an enzyme naturally recognizes and converts to a product in the biochemical pathway in which the enzyme naturally carries out its function; or is a modified version of the molecule, which is also recognized by the enzyme and is converted by the enzyme to a product in an enzymatic reaction similar to the naturally-occurring reaction.

[0148] As used herein, the term “suitable growth conditions” refers to growth conditions that are suitable for a certain desired outcome, for example, the production of a recombinant polypeptide or the expression of a nucleic acid molecule.

[0149] As used herein, the term “transformation” refers to a process for introducing heterologous DNA into a plant cell, plant tissue, or plant. Transformed plant cells, plant tissue, or plants are understood to encompass not only the end product of a transformation process, but also transgenic progeny thereof.

[0150] As used herein, the terms “transformed”, “transgenic”, and “recombinant” refer to a host organism such as a bacterium or a plant into which a heterologous nucleic acid molecule has been introduced. The nucleic acid molecule can be stably integrated into the genome of the host or the nucleic acid molecule can also be present as an extrachromosomal molecule. Such an extrachromosomal molecule can be auto-replicating. Transformed cells, tissues, or plants are understood to encompass not only the end product of a transformation process, but also transgenic progeny thereof. A “non-transformed,” “non-transgenic”, or “non-recombinant” host refers to a wild-type organism, e.g., a bacterium or plant, which does not contain the heterologous nucleic acid molecule.

[0151] As used herein, the term “viability” refers to a fitness parameter of a plant. Plants are assayed for their homozygous performance of plant development, indicating which polypeptides are essential for plant growth.

III. Nucleic Acids and Polypeptides

[0152] In one aspect, the presently disclosed subject matter provides an isolated nucleic acid molecule encoding a stress-related polypeptide, wherein the polypeptide binds to a fragment of a protein selected from the group consisting of OsGF14-c (SEQ ID NO: 113), OsDAD1 (SEQ ID NO: 128), Os006819-2510 (SEQ ID NO: 20), OsCRTC (SEQ ID NO: 134), OsSGT1 (SEQ ID NO: 144), OsERP (SEQ ID NO: 146), OsCHIB1 (SEQ ID NO: 152), OsCS (SEQ ID NO: 156), OsPP2A-2 (SEQ ID NO: 164), and OsCAA90866 (SEQ ID NO: 170). In certain embodiments, the isolated nucleic acid molecule is derived from rice (i.e., Oryza sativa).

[0153] As used herein, the phrase “stress-related polypeptide” refers to a protein or polypeptide (note that these two terms are used interchangeably throughout) that is involved in stress, particularly plant stress. Such a polypeptide can be involved in an increase in stress response; conversely, such a polypeptide can be involved in the abrogation or inhibition of stress response. Moreover, the polypeptide can be involved in stress response, for example, when the cell is exposed to a biotic or abiotic stress. A “stress-related polypeptide” of the presently disclosed subject matter is identified by the ability of an increase or decrease in the level of expression of such a polypeptide in a cell to modulate that cell's response to stress.

[0154] As used herein, term “binds” means that a stress-related polypeptide preferentially interacts with a stated target molecule. In some embodiments, that interaction allows a biological read-out (e.g., a positive in the yeast two-hybrid system). In some embodiments, that interaction is measurable (e.g., a K_{D} of at least 10⁻⁵ M).

[0155] Disclosed herein are rice (O. sativa)-derived cDNAs encoding plant proteins that interact with OsGF14-c (SEQ ID NO: 113), OsDAD1 (SEQ ID NO: 128), Os006819-2510 (SEQ ID NO: 20), OsCRTC (SEQ ID NO: 134), OsSGT1 (SEQ ID NO: 144), OsERP (SEQ ID NO: 146), OsCHIB1 (SEQ ID NO: 152), OsCS (SEQ ID NO: 156), OsPP2A-2 (SEQ ID NO: 164), and OsCAA90866 (SEQ ID NO: 170) in the yeast two-hybrid system.

[0156] In certain embodiments, the presently disclosed subject matter provides an isolated nucleic acid molecule comprising a nucleotide sequence substantially similar to the nucleotide sequence of the nucleic acid molecule encoding a stress-related polypeptide disclosed herein.

[0157] In a broad sense, the term “substantially similar”, as used herein with respect to a nucleotide sequence, refers to a nucleotide sequence corresponding to a reference nucleotide sequence (i.e., a nucleotide sequence of a nucleic acid molecule encoding a stress-related protein of the presently disclosed subject matter), wherein the corresponding sequence encodes a polypeptide having substantially the same structure as the polypeptide encoded by the reference nucleotide sequence. In some embodiments, the substantially similar nucleotide sequence encodes the polypeptide encoded by the reference nucleotide sequence (i.e., although the nucleotide sequence is different, the encoded protein has the same amino acid sequence). In some embodiments, “substantially similar” refers to nucleotide sequences having at least 50% sequence identity, or at least 60%, 70%, 80% or 85%, or at least 90% or 95%, or at least 96%, 97% or 99% sequence identity, compared to a reference sequence containing nucleotide sequences encoding one of the stress-related proteins of the presently disclosed subject matter (e.g., the proteins described below in the Examples).

[0158] “Substantially similar” also refers to nucleotide sequences having at least 50% identity, or at least 80% identity, or at least 95% identity, or at least 99% identity, to a region of nucleotide sequence encoding a BIOPATH protein and/or an Functional Protein Domain (FPD), wherein the nucleotide sequence comparisons are conducted using GAP analysis as described herein. The term “substantially similar” is specifically intended to include nucleotide sequences wherein the sequence has been modified to optimize expression in particular cells.

[0159] A polynucleotide including a nucleotide sequence “substantially similar” to the reference nucleotide sequence hybridizes to a polynucleotide including the reference nucleotide sequence in one embodiment in 7% sodium dodecyl sulfate (SDS), 0.5 M NaPO₄, 1 mM ethylenediamine teatraacetic acid (EDTA) at 50° C. with washing in 2× standard saline citrate (SSC), 0.1% SDS at 50° C., in another embodiment in 7% sodium dodecyl sulfate (SDS), 0.5 M NaPO₄, 1 mM EDTA at 50° C. with washing in 1×SSC, 0.1% SDS at 50° C., in another embodiment in 7% sodium dodecyl sulfate (SDS), 0.5 M NaPO₄, 1 mM EDTA at 50° C. with washing in 0.5×SSC, 0.1% SDS at 50° C., or in 7% sodium dodecyl sulfate (SDS), 0.5 M NaPO₄, 1 mM EDTA at 50° C. with washing in 0.1×SSC, 0.1% SDS at 50° C., or in still another embodiment in 7% sodium dodecyl sulfate (SDS), 0.5 M NaPO₄, 1 mM EDTA at 50° C. with washing in 0.1×SSC, 0.1% SDS at 65° C.

[0160] The term “substantially similar”, when used herein with respect to a protein or polypeptide, refers to a protein or polypeptide corresponding to a reference protein (i.e., a stress-related protein of the presently disclosed subject matter), wherein the protein has substantially the same structure and function as the reference protein, where only changes in amino acids sequence that do not materially affect the polypeptide function occur. When used for a protein or an amino acid sequence the percentage of identity between the substantially similar and the reference protein or amino acid sequence is at least 30%, or at least 40%, 50%, 60%, 70%, 80%, 85%, or 90%, or at least 95%, or at least 99% with every individual number falling within this range of at least 30% to at least 99% also being part of the presently disclosed subject matter, using default GAP analysis parameters with the GCG Wisconsin Package SEQWEB® application of GAP, based on the algorithm of Needleman & Wunsch, 1970.

[0161] In one embodiment, the polypeptide is involved in a function such as abiotic stress tolerance, disease resistance, enhanced yield or nutritional quality or composition. In one embodiment, the polypeptide is involved in drought resistance.

[0162] In one embodiment, isolated polypeptides comprise the amino acid sequences set forth in even numbered SEQ ID NOs: 2-112, and variants having conservative amino acid modifications. The term “conservative modified variants” refers to polypeptides that can be encoded by nucleic acid sequences having degenerate codon substitutions wherein at least one position of one or more selected (or all) codons is substituted with mixed-base and/or deoxyinosine residues (Batzer et al., 1991; Ohtsuka et al., 1985; Rossolini et al., 1994). Additionally, one skilled in the art will recognize that individual substitutions, deletions, or additions to a nucleic acid, peptide, polypeptide, or polypeptide sequence that alters, adds, or deletes a single amino acid or a small percentage of amino acids in the encoded sequence is a “conservative modification” where the modification results in the substitution of an amino acid with a chemically similar amino acid. Conservative modified variants provide similar biological activity as the unmodified polypeptide. Conservative substitution tables listing functionally similar amino acids are known in the art. See Creighton, 1984.

[0163] The term “conservatively modified variant” also refers to a peptide having an amino acid residue sequence substantially similar to a sequence of a polypeptide of the presently disclosed subject matter in which one or more residues have been conservatively substituted with a functionally similar residue. Examples of conservative substitutions include the substitution of one non-polar (hydrophobic) residue such as isoleucine, valine, leucine or methionine for another; the substitution of one polar (hydrophilic) residue for another such as between arginine and lysine, between glutamine and asparagine, between glycine and serine; the substitution of one basic residue such as lysine, arginine or histidine for another; or the substitution of one acidic residue, such as aspartic acid or glutamic acid for another.

[0164] Amino acid substitutions, such as those which might be employed in modifying the polypeptides described herein, are generally based on the relative similarity of the amino acid side-chain substituents, for example, their hydrophobicity, hydrophilicity, charge, size, and the like. An analysis of the size, shape and type of the amino acid side-chain substituents reveals that arginine, lysine and histidine are all positively charged residues; that alanine, glycine and serine are all of similar size; and that phenylalanine, tryptophan and tyrosine all have a generally similar shape. Therefore, based upon these considerations, arginine, lysine and histidine; alanine, glycine and serine; and phenylalanine, tryptophan and tyrosine; are defined herein as biologically functional equivalents. Other biologically functionally equivalent changes will be appreciated by those of skill in the art.

[0165] In making biologically functional equivalent amino acid substitutions, the hydropathic index of amino acids can be considered. Each amino acid has been assigned a hydropathic index on the basis of their hydrophobicity and charge characteristics, these are: isoleucine (+4.5); valine (+4.2); leucine (+3.8); phenylalanine (+2.8); cysteine (+2.5); methionine (+1.9); alanine (+1.8); glycine (−0.4); threonine (−0.7); serine (−0.8); tryptophan (−0.9); tyrosine (−1.3); proline (−1.6); histidine (−3.2); glutamate (−3.5); glutamine (−3.5); aspartate (−3.5); asparagine (−3.5); lysine (−3.9); and arginine (−4.5).

[0166] The importance of the hydropathic amino acid index in conferring interactive biological function on a protein is generally understood in the art (Kyte & Doolittle, 1982, incorporated herein by reference). It is known that certain amino acids can be substituted for other amino acids having a similar hydropathic index or score and still retain a similar biological activity. Substitutions of amino acids involve amino acids for which the hydropathic indices are in one embodiment within ±2 of the original value, in another embodiment within ±1 of the original value, and in still another embodiment within ±0.5 of the original value in making changes based upon the hydropathic index.

[0167] It is also understood in the art that the substitution of like amino acids can be made effectively on the basis of hydrophilicity. U.S. Pat. No. 4,554,101, incorporated herein by reference, states that the greatest local average hydrophilicity of a protein, as governed by the hydrophilicity of its adjacent amino acids, correlates with its immunogenicity and antigenicity, i.e. with a biological property of the protein. It is understood that an amino acid can be substituted for another having a similar hydrophilicity value and still obtain a biologically equivalent protein.

[0168] As detailed in U.S. Pat. No. 4,554,101, the following hydrophilicity values have been assigned to amino acid residues: arginine (+3.0); lysine (+3.0); aspartate (+3.0±1); glutamate (+3.0±1); serine (+0.3); asparagine (+0.2); glutamine (+0.2); glycine (0); threonine (−0.4); proline (−0.5±1); alanine (−0.5); histidine (−0.5); cysteine (−1.0); methionine (−1.3); valine (−1.5); leucine (−1.8); isoleucine (−1.8); tyrosine (−2.3); phenylalanine (−2.5); tryptophan (−3.4).

[0169] Substitutions of amino acids involve amino acids for which the hydrophilicity values are in one embodiment within ±2 of the original value, in another embodiment within ±1 of the original value, and in still another embodiment within ±0.5 of the original value in making changes based upon similar hydrophilicity values.

[0170] While discussion has focused on functionally equivalent polypeptides arising from amino acid changes, it will be appreciated that these changes can be effected by alteration of the encoding DNA, taking into consideration also that the genetic code is degenerate and that two or more codons can code for the same amino acid.

[0171] In one embodiment, the polypeptide is expressed in a specific location or tissue of a plant. In one embodiment, the location or tissue includes, but is not limited to, epidermis, vascular tissue, meristem, cambium, cortex, or pith. In another embodiment, the location or tissue is leaf or sheath, root, flower, and developing ovule or seed. In another embodiment, the location or tissue can be, for example, epidermis, root, vascular tissue, meristem, cambium, cortex, pith, leaf, or flower. In yet another embodiment, the location or tissue is a seed.

[0172] The polypeptides of the presently disclosed subject matter, fragments thereof, or variants thereof, can comprise any number of contiguous amino acid residues from a polypeptide of the presently disclosed subject matter, wherein the number of residues is selected from the group of integers consisting of from 10 to the number of residues in a full-length polypeptide of the presently disclosed subject matter. In one embodiment, the portion or fragment of the polypeptide is a functional polypeptide. The presently disclosed subject matter includes active polypeptides having specific activity of at least in one embodiment 20%, in another embodiment 30%, in another embodiment 40%, in another embodiment 50%, in another embodiment 60%, in another embodiment 70%, in another embodiment 80%, in another embodiment 90%, and in still another embodiment 95% that of the native (non-synthetic) endogenous polypeptide. Further, the substrate specificity (k_{cat}/Kₘ) can be substantially similar to the native (non-synthetic), endogenous polypeptide. Typically the Kₘ will be at least in one embodiment 30%, in another embodiment 40%, in another embodiment 50% of the native, endogenous polypeptide; and in another embodiment at least 60%, in another embodiment 70%, in another embodiment 80%, and in yet another embodiment 90% of the native, endogenous polypeptide. Methods of assaying and quantifying measures of activity and substrate specificity are well known to those of skill in the art.

[0173] The isolated polypeptides of the presently disclosed subject matter can elicit production of an antibody specifically reactive to a polypeptide of the presently disclosed subject matter when presented as an immunogen. Therefore, the polypeptides of the presently disclosed subject matter can be employed as immunogens for constructing antibodies immunoreactive to a polypeptide of the presently disclosed subject matter for such purposes including, but not limited to, immunoassays or polypeptide purification techniques. Immunoassays for determining binding are well known to those of skill in the art and include, but are not limited to, enzyme-linked immunosorbent assays (ELISAs) and competitive immunoassays.

IV. The Yeast Two-Hybrid System

[0174] The yeast two-hybrid system is a well known system which is based on the finding that most eukaryotic transcription activators are modular (see e.g., Gyuris et al., 1993; Bartel & Fields, 1997; Feys et al., 2001). The yeast two-hybrid system uses: 1) a plasmid that directs the synthesis of a “bait” (a known protein which is brought to the yeast's DNA by being fused to a DNA binding domain); 2) one or more reporter genes (“reporters”) with upstream binding sites for the bait; and 3) a plasmid that directs the synthesis of proteins fused to activation domains and other useful moieties (“activation tagged proteins”, or “prey”).

[0175] In all of the Examples described below, an automated, high-throughput yeast two-hybrid assay technology (provided by Myriad Genetics Inc., Salt Lake City, Utah, United States of America) was used to search for protein interactions with the bait proteins. Briefly, the target protein (e.g., OsE2F1) was expressed in yeast as a fusion to the DNA-binding domain of the yeast Ga14p polypeptide. DNA encoding the target protein or a fragment of this protein was amplified from cDNA by PCR or prepared from an available clone. The resulting DNA fragment was cloned by ligation or recombination into a DNA-binding domain vector (e.g., pGBT9, pGBT.C, pAS2-1) such that an in-frame fusion between the Ga14p and target protein sequences was created. The resulting construct, the target gene construct, was introduced by transformation into a haploid yeast strain.

[0176] A screening protocol was then used to search the individual baits against two activation domain libraries of assorted peptide motifs of greater than five million cDNA clones. The libraries were derived from RNA isolated from leaves, stems, and roots of rice plants grown in normal conditions, plus tissues from plants exposed to various stresses (input trait library), and from various seed stages, callus, and early and late panicle (output trait library). To screen, a library of activation domain fusions (i.e., O. sativa cDNA cloned into an activation domain vector) was introduced by transformation into a haploid yeast strain of the opposite mating type. The yeast strain that carried the activation domain constructs contained one or more Ga14p-responsive reporter genes, the expression of which can be monitored. Non-limiting examples of some yeast reporter strains include Y190, PJ69, and CBY14a.

[0177] Yeast carrying the target gene construct was combined with yeast carrying the activation domain library. The two yeast strains mated to form diploid yeast and were plated on media that selected for expression of one or more Ga14p-responsive reporter genes. Thus, both hybrid proteins (i.e., the target “bait” protein and the activation domain “prey” protein) were expressed in a yeast reporter strain where an interaction between the test proteins results in transcription of the reporter genes TRP1 and LEU2, allowing growth on selective medium lacking tryptophan and leucine. Colonies that arose after incubation were selected for further characterization. The activation domain plasmid was isolated from each colony obtained in the two-hybrid search. The sequence of the insert in this construct was obtained by sequence analysis (e.g., Sanger's dideoxy nucleotide chain termination method; see Ausubel et al., 1988, including updates up to 2002). Thus, the identity of positives obtained from these searches was determined by sequence analysis against proprietary and public (e.g., GENBANK®) nucleic acid and protein databases.

[0178] Interaction of the activation domain fusion with the target protein was confirmed by testing for the specificity of the interaction. The activation domain construct was co-transformed into a yeast reporter strain with either the original target protein construct or a variety of other DNA-binding domain constructs. Expression of the reporter genes in the presence of the target protein but not with other test proteins indicated that the interaction was genuine.

[0179] To further characterize the genes encoding the interacting proteins, the nucleic acid sequences of the baits and preys were compared with nucleic acid sequences present on Torrey Mesa Research Institute (TMRI)'s proprietary GENECHIP® Rice Genome Array (Affymetrix, Santa Clara, Calif., United States of America; see Zhu et al., 2001). The rice genome array contained 25-mer oligonucleotide probes with sequences corresponding to the 3′ ends of 21,000 predicted open reading frames found in approximately 42,000 contigs that make up the rice genome map (see Goff et al., 2002). Sixteen different probes were used to measure the expression level of each nucleic acid. The sequences of the probes are available at http://tmri.org/gene_exp_web/. The calculated expression value was determined based on the observed expression level minus the noise background associated with each probe. Experiments included evaluating the differential gene expression from various plant tissues comprising seed, root, leaf and stem, panicle, and pollen. Gene expression was also measured in plants exposed to environmental cold (i.e., 14° C.), osmotic pressure (growth media supplemented with 260 mM mannitol), drought (media supplemented with 25% polyethylene glycol 8000), salt (media supplemented with 150 mM NaCl), abscisic acid (ABA)-inducible stresses (media supplemented with 50 uM ABA; see Chen et al., 2002), infection by the fungal pathogen Magnaporthe grisea, and treatment with plant hormones (jasmonic acid (JA; 100 μM), gibberellin (GA3; 50 μM), and abscisic acid) and with herbicides benzylamino purine (BAP; 10 μM), 2,4-dichlorophenoxyacetic acid (2,4-D; 2 mg/l), and BL2 (10 μM).

[0180] Many of the stress-related proteins of the presently disclosed subject matter interact with one another.

V. Controlling and Modulating the Expression of Nucleic Acid Molecules

A. General Considerations

[0181] One aspect of the presently disclosed subject matter provides compositions and methods for modulating (i.e. increasing or decreasing) the level of nucleic acid molecules and/or polypeptides of the presently disclosed subject matter in plants. In particular, the nucleic acid molecules and polypeptides of the presently disclosed subject matter are expressed constitutively, temporally, or spatially (e.g., at developmental stages), in certain tissues, and/or quantities, which are uncharacteristic of non-recombinantly engineered plants. Therefore, the presently disclosed subject matter provides utility in such exemplary applications as altering the specified characteristics identified above.

[0182] The isolated nucleic acid molecules of the presently disclosed subject matter are useful for expressing a polypeptide of the presently disclosed subject matter in a recombinantly engineered cell such as a bacterial, yeast, insect, mammalian, or plant cell. Expressing cells can produce the polypeptide in a non-natural condition (e.g., in quantity, composition, location and/or time) because they have been genetically altered to do so. Those skilled in the art are knowledgeable in the numerous expression systems available for expression of nucleic acids encoding a polypeptide of the presently disclosed subject matter.

[0183] In another aspect, the presently disclosed subject matter features a stress-related polypeptide encoded by a nucleic acid molecule disclosed herein. In certain embodiments, the stress-related polypeptide is isolated.

[0184] The presently disclosed subject matter further provides a method for modifying (i.e. increasing or decreasing) the concentration or composition of a polypeptide of the presently disclosed subject matter in a plant or part thereof. Modification can be effected by increasing or decreasing the concentration and/or the composition (i.e. the ration of the polypeptides of the presently disclosed subject matter) in a plant. The method comprises introducing into a plant cell an expression cassette comprising a nucleic acid molecule of the presently disclosed subject matter as disclosed above to obtain a transformed plant cell or tissue, and culturing the transformed plant cell or tissue. The nucleic acid molecule can be under the regulation of a constitutive or inducible promoter. The method can further comprise inducing or repressing expression of a nucleic acid molecule of a sequence in the plant for a time sufficient to modify the concentration and/or composition in the plant or plant part.

[0185] A plant or plant part having modified expression of a nucleic acid molecule of the presently disclosed subject matter can be analyzed and selected using methods known to those skilled in the art including, but not limited to, Southern blotting, DNA sequencing; or PCR analysis using primers specific to the nucleic acid molecule and detecting amplicons produced therefrom.

[0186] In general, a concentration or composition is increased or decreased by at least in one embodiment 5%, in another embodiment 10%, in another embodiment 20%, in another embodiment 30%, in another embodiment 40%, in another embodiment 50%, in another embodiment 60%, in another embodiment 70%, in another embodiment 80%, and in still another embodiment 90% relative to a native control plant, plant part, or cell lacking the expression cassette.

B. Modulation of Expression of Nucleic Acid Molecules

[0187] The compositions of the presently disclosed subject matter include plant nucleic acid molecules, and the amino acid sequences of the polypeptides or partial-length polypeptides encoded by nucleic acid molecules comprising an open reading frame. These sequences can be employed to alter the expression of a particular gene corresponding to the open reading frame by decreasing or eliminating expression of that plant gene or by overexpressing a particular gene product. Methods of this embodiment of the presently disclosed subject matter include stably transforming a plant with a nucleic acid molecule of the presently disclosed subject matter that includes an open reading frame operatively linked to a promoter capable of driving expression of that open reading frame (sense or antisense) in a plant cell. By “portion” or “fragment”, as it relates to a nucleic acid molecule that comprises an open reading frame or a fragment thereof encoding a partial-length polypeptide having the activity of the full length polypeptide, is meant a sequence having in one embodiment at least 80 nucleotides, in another embodiment at least 150 nucleotides, and in still another embodiment at least 400 nucleotides. If not employed for expression, a “portion” or “fragment” means in representative embodiments at least 9, or 12, or 15, or at least 20, consecutive nucleotides (e.g., probes and primers or other oligonucleotides) corresponding to the nucleotide sequence of the nucleic acid molecules of the presently disclosed subject matter. Thus, to express a particular gene product, the method comprises introducing into a plant, plant cell, or plant tissue an expression cassette comprising a promoter operatively linked to an open reading frame so as to yield a transformed differentiated plant, transformed cell, or transformed tissue. Transformed cells or tissue can be regenerated to provide a transformed differentiated plant. The transformed differentiated plant or cells thereof can express the open reading frame in an amount that alters the amount of the gene product in the plant or cells thereof, which product is encoded by the open reading frame. The presently disclosed subject matter also provides a transformed plant prepared by the methodsa disclosed herein, as well as progeny and seed thereof.

[0188] The presently disclosed subject matter further includes a nucleotide sequence that is complementary to one (hereinafter “test” sequence) that hybridizes under stringent conditions to a nucleic acid molecule of the presently disclosed subject matter, as well as an RNA molecule that is transcribed from the nucleic acid molecule. When hybridization is performed under stringent conditions, either the test or nucleic acid molecule of presently disclosed subject matter can be present on a support: e.g., on a membrane or on a DNA chip. Thus, either a denatured test or nucleic acid molecule of the presently disclosed subject matter is first bound to a support and hybridization is effected for a specified period of time at a temperature of, in one embodiment, between 55° C. and 70° C., in 2×SSC containing 0.1% SDS, followed by rinsing the support at the same temperature but with a buffer having a reduced SSC concentration. Depending upon the degree of stringency required, such reduced concentration buffers are typically 1×SSC containing 0.1% SDS, 0.5×SSC containing 0.1% SDS, or 0.1×SSC containing 0.1% SDS.

[0189] In a further embodiment, the presently disclosed subject matter provides a transformed plant host cell, or one obtained through breeding, capable of over-expressing, under-expressing, or having a knockout of a polypeptide-encoding gene and/or its gene product(s). The plant cell is transformed with at least one such expression vector wherein the plant host cell can be used to regenerate plant tissue or an entire plant, or seed there from, in which the effects of expression, including overexpression and underexpression, of the introduced sequence or sequences can be measured in vitro or in planta.

[0190] In another aspect, the presently disclosed subject matter features an isolated stress-related polypeptide, wherein the polypeptide binds to a fragment of a protein selected from the group consisting of OsGF14-c (SEQ ID NO: 113), OsDAD1 (SEQ ID NO: 128), Os006819-2510 (SEQ ID NO: 20), OsCRTC (SEQ ID NO: 134), OsSGT1 (SEQ ID NO: 144), OsERP (SEQ ID NO: 146), OsCHIB1 (SEQ ID NO: 152), OsCS (SEQ ID NO: 156), OsPP2A-2 (SEQ ID NO: 164), and OsCAA90866 (SEQ ID NO: 170). In some embodiments, the presently disclosed subject matter features an isolated polypeptide comprising or consisting of an amino acid sequence substantially similar to the amino acid sequence of an isolated stress-related polypeptide of the presently disclosed subject matter.

[0191] Because the proteins of the presently disclosed subject matter have a roll in stress, in certain embodiments, a cell introduced with a nucleic acid molecule of the presently disclosed subject matter has a different stress response as compared to a cell not introduced with the nucleic acid molecule.

[0192] In another aspect, the presently disclosed subject matter features a method for modulating stress response of a plant cell, the method comprising introducing an isolated nucleic acid molecule encoding a stress-related polypeptide into the plant cell, wherein the polypeptide binds to a fragment of a protein selected from the group consisting of OsGF14-c (SEQ ID NO: 113), OsDAD1 (SEQ ID NO: 128), Os006819-2510 (SEQ ID NO: 20), OsCRTC (SEQ ID NO: 134), OsSGT1 (SEQ ID NO: 144), OsERP (SEQ ID NO: 146), OsCHIB1 (SEQ ID NO: 152), OsCS (SEQ ID NO: 156), OsPP2A-2 (SEQ ID NO: 164), and OsCAA90866 (SEQ ID NO: 170), wherein the polypeptide is expressed by the cell.

[0193] In another aspect, the presently disclosed subject matter features a method for modulating stress response of a plant cell comprising introducing an isolated nucleic acid molecule encoding a stress-related polypeptide into the plant cell, wherein the polypeptide binds to a fragment of a protein selected from the group consisting of OsGF14-c (SEQ ID NO: 113), OsDAD1 (SEQ ID NO: 128), Os006819-2510 (SEQ ID NO: 20), OsCRTC (SEQ ID NO: 134), OsSGT1 (SEQ ID NO: 144), OsERP (SEQ ID NO: 146), OsCHIB1 (SEQ ID NO: 152), OsCS (SEQ ID NO: 156), OsPP2A-2 (SEQ ID NO: 164), and OsCAA90866 (SEQ ID NO: 170), wherein expression of the polypeptide encoded by the nucleic acid molecule is reduced in the cell.

[0194] As discussed herein, the stress-related proteins described herein can affect a cell under conditions of stress (e.g., when the plant is exposed to biotic or abiotic stress). Accordingly, by changing the amount of a stress-related protein of the presently disclosed subject matter in a plant cell, the response of that plant cell to stress can be modulated.

[0195] In some situations, increasing expression of a stress-related protein of the presently disclosed subject matter in a cell will cause that cell to increase its stress response (in some cases, rate of proliferation). In other situations, increasing expression of a stress-related protein of the presently disclosed subject matter in a cell causes that cell to reduce its stress response (in some cases, rate of proliferation). Similarly, decreasing the expression of a stress-related protein of the presently disclosed subject matter in a cell can increase or decrease that cell's stress response (in some cases, rate of proliferation). What is relevant is that the stress response of the cell changes if the level of expression of a stress-related protein of the presently disclosed subject matter is either increased or decreased.

[0196] Increasing the level of expression of a stress-related protein of the presently disclosed subject matter in a cell is a relatively simple matter. For example, overexpression of the protein can be accomplished by transforming the cell with a nucleic acid molecule encoding the protein according to standard methods such as those described above.

[0197] Reducing the level of expression of a stress-related protein of the presently disclosed subject matter in a cell is likewise simply accomplished using standard methods. For example, an antisense RNA or DNA oligonucleotide that is complementary to the sense strand (i.e., the mRNA strand) of a nucleic acid molecule encoding the protein can be administered to the cell to reduce expression of that protein in that cell (see e.g., Agrawal, 1993; U.S. Pat. No. 5,929,226).

[0198] The modulation in expression of the nucleic acid molecules of the presently disclosed subject matter can be achieved, for example, in one of the following ways:

[0199] 1. “Sense” Suppression

[0200] Alteration of the expression of a nucleotide sequence of the presently disclosed subject matter, in one embodiment reduction of its expression, is obtained by “sense” suppression (referenced in e.g., Jorgensen et al., 1996). In this case, the entirety or a portion of a nucleotide sequence of the presently disclosed subject matter is comprised in a DNA molecule. The DNA molecule can be operatively linked to a promoter functional in a cell comprising the target gene, in one embodiment a plant cell, and introduced into the cell, in which the nucleotide sequence is expressible. The nucleotide sequence is inserted in the DNA molecule in the “sense orientation”, meaning that the coding strand of the nucleotide sequence can be transcribed. In one embodiment, the nucleotide sequence is fully translatable and all the genetic information comprised in the nucleotide sequence, or portion thereof, is translated into a polypeptide. In another embodiment, the nucleotide sequence is partially translatable and a short peptide is translated. In one embodiment, this is achieved by inserting at least one premature stop codon in the nucleotide sequence, which brings translation to a halt. In another embodiment, the nucleotide sequence is transcribed but no translation product is made. This is usually achieved by removing the start codon, i.e. the “ATG”, of the polypeptide encoded by the nucleotide sequence. In a further embodiment, the DNA molecule comprising the nucleotide sequence, or a portion thereof, is stably integrated in the genome of the plant cell. In another embodiment, the DNA molecule comprising the nucleotide sequence, or a portion thereof, is comprised in an extrachromosomally replicating molecule.

[0201] In transgenic plants containing one of the DNA molecules disclosed immediately above, the expression of the nucleotide sequence corresponding to the nucleotide sequence comprised in the DNA molecule can be reduced. The nucleotide sequence in the DNA molecule in one embodiment is at least 70% identical to the nucleotide sequence the expression of which is reduced, in another embodiment is at least 80% identical, in another embodiment is at least 90% identical, in another embodiment is at least 95% identical, and in still another embodiment is at least 99% identical.

[0202] 2. “Antisense” Suppression

[0203] In another embodiment, the alteration of the expression of a nucleotide sequence of the presently disclosed subject matter, for example the reduction of its expression, is obtained by “antisense” suppression. The entirety or a portion of a nucleotide sequence of the presently disclosed subject matter is comprised in a DNA molecule. The DNA molecule can be operatively linked to a promoter functional in a plant cell, and introduced in a plant cell, in which the nucleotide sequence is expressible. The nucleotide sequence is inserted in the DNA molecule in the “antisense orientation”, meaning that the reverse complement (also called sometimes non-coding strand) of the nucleotide sequence can be transcribed. In one embodiment, the DNA molecule comprising the nucleotide sequence, or a portion thereof, is stably integrated in the genome of the plant cell. In another embodiment the DNA molecule comprising the nucleotide sequence, or a portion thereof, is comprised in an extrachromosomally replicating molecule. Several publications describing this approach are cited for further illustration (Green et al., 1986; van der Krol et al., 1991; Powell et al., 1989; Ecker & Davis, 1986).

[0204] In transgenic plants containing one of the DNA molecules disclosed immediately above, the expression of the nucleotide sequence corresponding to the nucleotide sequence comprised in the DNA molecule can be reduced. The nucleotide sequence in the DNA molecule is in one embodiment at least 70% identical to the nucleotide sequence the expression of which is reduced, in another embodiment at least 80% identical, in another embodiment at least 90% identical, in another embodiment at least 95% identical, and in still another embodiment at least 99% identical.

[0205] 3. Homologous Recombination

[0206] In another embodiment, at least one genomic copy corresponding to a nucleotide sequence of the presently disclosed subject matter is modified in the genome of the plant by homologous recombination as further illustrated in Paszkowski et al., 1988. This technique uses the ability of homologous sequences to recognize each other and to exchange nucleotide sequences between respective nucleic acid molecules by a process known in the art as homologous recombination. Homologous recombination can occur between the chromosomal copy of a nucleotide sequence in a cell and an incoming copy of the nucleotide sequence introduced in the cell by transformation. Specific modifications are thus accurately introduced in the chromosomal copy of the nucleotide sequence. In one embodiment, the regulatory elements of the nucleotide sequence of the presently disclosed subject matter are modified. Such regulatory elements are easily obtainable by screening a genomic library using the nucleotide sequence of the presently disclosed subject matter, or a portion thereof, as a probe. The existing regulatory elements are replaced by different regulatory elements, thus altering expression of the nucleotide sequence, or they are mutated or deleted, thus abolishing the expression of the nucleotide sequence. In another embodiment, the nucleotide sequence is modified by deletion of a part of the nucleotide sequence or the entire nucleotide sequence, or by mutation. Expression of a mutated polypeptide in a plant cell is also provided in the presently disclosed subject matter. Recent refinements of this technique to disrupt endogenous plant genes have been disclosed (Kempin et al., 1997 and Miao & Lam, 1995).

[0207] In one embodiment, a mutation in the chromosomal copy of a nucleotide sequence is introduced by transforming a cell with a chimeric oligonucleotide composed of a contiguous stretch of RNA and DNA residues in a duplex conformation with double hairpin caps on the ends. An additional feature of the oligonucleotide is for example the presence of 2′-O-methylation at the RNA residues. The RNA/DNA sequence is designed to align with the sequence of a chromosomal copy of a nucleotide sequence of the presently disclosed subject matter and to contain the desired nucleotide change. For example, this technique is further illustrated in U.S. Pat. No. 5,501,967 and Zhu et al., 1999.

[0208] 4. Ribozymes

[0209] In a further embodiment, an RNA coding for a polypeptide of the presently disclosed subject matter is cleaved by a catalytic RNA, or ribozyme, specific for such RNA. The ribozyme is expressed in transgenic plants and results in reduced amounts of RNA coding for the polypeptide of the presently disclosed subject matter in plant cells, thus leading to reduced amounts of polypeptide accumulated in the cells. This method is further illustrated in U.S. Pat. No. 4,987,071.

[0210] 5. Dominant-Negative Mutants

[0211] In another embodiment, the activity of a polypeptide encoded by the nucleotide sequences of the presently disclosed subject matter is changed. This is achieved by expression of dominant negative mutants of the polypeptides in transgenic plants, leading to the loss of activity of the endogenous polypeptide.

[0212] 6. Aptamers

[0213] In a further embodiment, the activity of polypeptide of the presently disclosed subject matter is inhibited by expressing in transgenic plants nucleic acid ligands, so-called aptamers, which specifically bind to the polypeptide. Aptamers can be obtained by the SELEX (Systematic Evolution of Ligands by Exponential Enrichment) method. In the SELEX method, a candidate mixture of single stranded nucleic acids having regions of randomized sequence is contacted with the polypeptide and those nucleic acids having an increased affinity to the target are partitioned from the remainder of the candidate mixture. The partitioned nucleic acids are amplified to yield a ligand-enriched mixture. After several iterations a nucleic acid with optimal affinity to the polypeptide is obtained and is used for expression in transgenic plants. This method is further illustrated in U.S. Pat. No. 5,270,163.

[0214] 7. Zinc Finger Polypeptides

[0215] A zinc finger polypeptide that binds a nucleotide sequence of the presently disclosed subject matter or to its regulatory region can also be used to alter expression of the nucleotide sequence. In alternative embodiments, transcription of the nucleotide sequence is reduced or increased. Zinc finger polypeptides are disclosed in, for example, Beerli et al., 1998, or in WO 95/19431, WO 98/54311, or WO 96/06166, all incorporated herein by reference in their entirety.

[0216] 8. dsRNA

[0217] Alteration of the expression of a nucleotide sequence of the presently disclosed subject matter can also be obtained by double stranded RNA (dsRNA) interference (RNAi) as disclosed, for example, in WO 99/32619, WO 99/53050, or WO 99/61631, all incorporated herein by reference in their entireties. In one embodiment, the alteration of the expression of a nucleotide sequence of the presently disclosed subject matter, in one embodiment the reduction of its expression, is obtained by dsRNA interference. The entirety, or in one embodiment a portion, of a nucleotide sequence of the presently disclosed subject matter, can be comprised in a DNA molecule. The size of the DNA molecule is in one embodiment from 100 to 1000 nucleotides or more; the optimal size to be determined empirically. Two copies of the identical DNA molecule are linked, separated by a spacer DNA molecule, such that the first and second copies are in opposite orientations. In one embodiment, the first copy of the DNA molecule is the reverse complement (also known as the non-coding strand) and the second copy is the coding strand; in another embodiment, the first copy is the coding strand, and the second copy is the reverse complement. The size of the spacer DNA molecule is in one embodiment 200 to 10,000 nucleotides, in another embodiment 400 to 5000 nucleotides, and in yet another embodiment 600 to 1500 nucleotides in length. The spacer is in one embodiment a random piece of DNA, in another embodiment a random piece of DNA without homology to the target organism for dsRNA interference, and in still another embodiment a functional intron that is effectively spliced by the target organism. The two copies of the DNA molecule separated by the spacer are operatively linked to a promoter functional in a plant cell, and introduced in a plant cell in which the nucleotide sequence is expressible. In one embodiment, the DNA molecule comprising the nucleotide sequence, or a portion thereof, is stably integrated in the genome of the plant cell. In another embodiment, the DNA molecule comprising the nucleotide sequence, or a portion thereof, is comprised in an extrachromosomally replicating molecule. Several publications describing this approach are cited for further illustration (Waterhouse et al., 1998; Chuang & Meyerowitz, 2000; Smith et al., 2000).

[0218] In another non-limiting example, RNA interference (RNAi) or post-transcriptional gene silencing (PTGS) can be employed to reduce the level of expression of a stress-related protein of the presently disclosed subject matter in a cell. As used herein, the terms “RNA interference” and “post-transcriptional gene silencing” are used interchangeably and refer to a process of sequence-specific modulation of gene expression mediated by a small interfering RNA (siRNA; see generally Fire et al., 1998), resulting in null or hypomorphic phenotypes. Thus, because described herein are nucleotide sequences encoding the stress-related proteins of the presently disclosed subject matter, RNAi can be readily designed. Indeed, constructs encoding an RNAi molecule have been developed which continuously synthesize an RNAi molecule, resulting in prolonged repression of expression of the targeted gene (Brummelkamp et al., 2002).

[0219] In transgenic plants containing one of the DNA molecules disclosed immediately above, the expression of the nucleotide sequence corresponding to the nucleotide sequence comprised in the DNA molecule is in one embodiment reduced. In one embodiment, the nucleotide sequence in the DNA molecule is at least 70% identical to the nucleotide sequence the expression of which is reduced, in another embodiment it is at least 80% identical, in another embodiment it is at least 90% identical, in another embodiment it is at least 95% identical, and in still another embodiment it is at least 99% identical.

[0220] 9. Insertion of a DNA Molecule (Insertional Mutagenesis)

[0221] In one embodiment, a DNA molecule is inserted into a chromosomal copy of a nucleotide sequence of the presently disclosed subject matter, or into a regulatory region thereof. In one embodiment, such DNA molecule comprises a transposable element capable of transposition in a plant cell, such as, for example, Ac/Ds, Em/Spm, mutator. Alternatively, the DNA molecule comprises a T-DNA border of an Agrobacterium T-DNA. The DNA molecule can also comprise a recombinase or integrase recognition site that can be used to remove part of the DNA molecule from the chromosome of the plant cell. Methods of insertional mutagenesis using T-DNA, transposons, oligonucleotides, or other methods known to those skilled in the art are also encompassed. Methods of using T-DNA and transposon for insertional mutagenesis are disclosed in Winkler & Feldmann, 1989, and Martienssen, 1998, incorporated herein by reference in their entireties.

[0222] 10. Deletion Mutagenesis

[0223] In yet another embodiment, a mutation of a nucleic acid molecule of the presently disclosed subject matter is created in the genomic copy of the sequence in the cell or plant by deletion of a portion of the nucleotide sequence or regulator sequence. Methods of deletion mutagenesis are known to those skilled in the art. See e.g., Miao & Lam, 1995.

[0224] In yet another embodiment, a deletion is created at random in a large population of plants by chemical mutagenesis or irradiation and a plant with a deletion in a gene of the presently disclosed subject matter is isolated by forward or reverse genetics. Irradiation with fast neutrons or gamma rays is known to cause deletion mutations in plants (Silverstone et al., 1998; Bruggemann et al., 1996; Redei & Koncz, 1992). Deletion mutations in a gene of the presently disclosed subject matter can be recovered in a reverse genetics strategy using PCR with pooled sets of genomic DNAs as has been shown in C. elegans (Liu et al., 1999). A forward genetics strategy involves mutagenesis of a line bearing a trait of interest followed by screening the M2 progeny for the absence of the trait. Among these mutants would be expected to be some that disrupt a gene of the presently disclosed subject matter. This could be assessed by Southern blotting or PCR using primers designed for a gene of the presently disclosed subject matter with genomic DNA from these mutants.

[0225] 11. Overexpression in a Plant Cell

[0226] In yet another embodiment, a nucleotide sequence of the presently disclosed subject matter encoding a polypeptide is overexpressed. Examples of nucleic acid molecules and expression cassettes for over-expression of a nucleic acid molecule of the presently disclosed subject matter are disclosed above. Methods known to those skilled in the art of over-expression of nucleic acid molecules are also encompassed by the presently disclosed subject matter.

[0227] In one embodiment, the expression of the nucleotide sequence of the presently disclosed subject matter is altered in every cell of a plant. This can be obtained, for example, though homologous recombination or by insertion into a chromosome. This can also be obtained, for example, by expressing a sense or antisense RNA, zinc finger polypeptide or ribozyme under the control of a promoter capable of expressing the sense or antisense RNA, zinc finger polypeptide, or ribozyme in every cell of a plant. Constitutive, inducible, tissue-specific, cell type-specific, or developmentally-regulated expression are also within the scope of the presently disclosed subject matter and result in a constitutive, inducible, tissue-specific, or developmentally-regulated alteration of the expression of a nucleotide sequence of the presently disclosed subject matter in the plant cell. Constructs for expression of the sense or antisense RNA, zinc finger polypeptide, or ribozyme, or for over-expression of a nucleotide sequence of the presently disclosed subject matter, can be prepared and transformed into a plant cell according to the teachings of the presently disclosed subject matter, for example, as disclosed herein.

C. Construction of Plant Expression Vectors

[0228] Further encompassed within the presently disclosed subject matter is a recombinant vector comprising an expression cassette according to the embodiments of the presently disclosed subject matter. Also encompassed are plant cells comprising expression cassettes according to the present disclosure, and plants comprising these plant cells. In one embodiment, the plant is a dicot. In another embodiment, the plant is a gymnosperm. In another embodiment, the plant is a monocot. In one embodiment, the monocot is a cereal. In one embodiment, the cereal is, for example, maize, wheat, barley, oats, rye, millet, sorghum, triticale, secale, einkom, spelt, emmer, teff, milo, flax, gramma grass, Tripsacum or teosinte. In another embodiment, the cereal is sorghum.

[0229] In one embodiment, the expression cassette is expressed throughout the plant. In another embodiment, the expression cassette is expressed in a specific location or tissue of a plant. In one embodiment, the location or tissue includes, but is not limited to, epidermis, root, vascular tissue, meristem, cambium, cortex, pith, leaf, flower, and combinations thereof. In another embodiment, the location or tissue is a seed.

[0230] In one embodiment, the expression cassette is involved in a function including, but not limited to, disease resistance, yield, biotic or abiotic stress resistance, nutritional quality, carbon metabolism, photosynthesis, signal transduction, cell growth, reproduction, disease processes (for example, pathogen resistance), gene regulation, and differentiation. In one embodiment, the polypeptide is involved in a function such as biotic or abiotic stress tolerance, enhanced yield or proliferation, disease resistance, or nutritional composition.

[0231] For example, a nucleic acid molecule of the presently disclosed subject matter can be introduced, under conditions for expression, into a host cell such that the host cell transcribes and translates the nucleic acid molecule to produce a stress-related polypeptide. By “under conditions for expression” is meant that a nucleic acid molecule is positioned in the cell such that it will be expressed in that cell. For example, a nucleic acid molecule can be located downstream of a promoter that is active in the cell, such that the promoter will drive the expression of the polypeptide encoded for by the nucleic acid molecule in the cell. Any regulatory sequence (e.g., promoter, enhancer, inducible promoter) can be linked to the nucleic acid molecule; alternatively, the nucleic acid molecule can include its own regulatory sequence(s) such that it will be expressed (i.e., transcribed and/or translated) in a cell.

[0232] Where the nucleic acid molecule of the presently disclosed subject matter is introduced into a cell under conditions of expression, that nucleic acid molecule can be included in an expression cassette. Thus, the presently disclosed subject matter further provides a host cell comprising an expression cassette comprising a nucleic acid molecule encoding a stress-related polypeptide as disclosed herein. Such an expression cassette can include, in addition to the nucleic acid molecule encoding a stress-related polypeptide of the presently disclosed subject matter, at least one regulatory sequence (e.g., a promoter and/or an enhancer).

[0233] As such, coding sequences intended for expression in transgenic plants can be first assembled in expression cassettes operatively linked to a suitable promoter expressible in plants. The expression cassettes can also comprise any further sequences required or selected for the expression of the transgene. Such sequences include, but are not limited to, transcription terminators, extraneous sequences to enhance expression such as introns, vital sequences, and sequences intended for the targeting of the gene product to specific organelles and cell compartments. These expression cassettes can then be easily transferred to the plant transformation vectors disclosed below. The following is a description of various components of typical expression cassettes.

[0234] 1. Promoters

[0235] The selection of the promoter used in expression cassettes can determine the spatial and temporal expression pattern of the transgene in the transgenic plant. Selected promoters can express transgenes in specific cell types (such as leaf epidermal cells, mesophyll cells, root cortex cells) or in specific tissues or organs (roots, leaves, or flowers, for example) and the selection can reflect the desired location for accumulation of the gene product. Alternatively, the selected promoter can drive expression of the gene under various inducing conditions. Promoters vary in their strength; i.e., their abilities to promote transcription. Depending upon the host cell system utilized, any one of a number of suitable promoters can be used, including the gene's native promoter. The following are non-limiting examples of promoters that can be used in expression cassettes.

[0236] In one non-limiting example, a plant promoter fragment can be employed that will direct expression of the gene in all tissues of a regenerated plant. Such promoters are referred to herein as “constitutive” promoters and are active under most environmental conditions and states of development or cell differentiation. Examples of constitutive promoters include the cauliflower mosaic virus (CaMV) 35S transcription initiation region, the 1′- or 2′-promoter derived from T-DNA of Agrobacterium tumefaciens, and other transcription initiation regions from various plant genes known to those of ordinary skill in the art. Such genes include for example, the AP2 gene, ACT11 from Arabidopsis (Huang et al., 1996), Cat3 from Arabidopsis (GENBANK® Accession No. U43147; Zhong et al., 1996), the gene encoding stearoyl-acyl carrier protein desaturase from Brassica napus (GENBANK® Accession No. X74782; Solocombe et al., 1994), GPc1 from maize (GENBANK® Accession No. X15596; Martinez et al., 1989), and Gpc2 from maize (GENBANK® Accession No. U45855; Manjunath et al., 1997).

[0237] Alternatively, the plant promoter can direct expression of the nucleic acid molecules of the presently disclosed subject matter in a specific tissue or can be otherwise under more precise environmental or developmental control. Examples of environmental conditions that can effect transcription by inducible promoters include anaerobic conditions, elevated temperature, or the presence of light. Such promoters are referred to herein as “inducible”, “cell type-specific”, or “tissue-specific” promoters. Ordinary skill in the art will recognize that a tissue-specific promoter can drive expression of operatively linked sequences in tissues other than the target tissue. Thus, as used herein a tissue-specific promoter is one that drives expression preferentially in the target tissue, but can also lead to some expression in other tissues as well.

[0238] Examples of promoters under developmental control include promoters that initiate transcription only (preferentially) in certain tissues, such as fruit, seeds, or flowers. Promoters that direct expression of nucleic acids in ovules, flowers, or seeds are particularly useful in the presently disclosed subject matter. As used herein a seed-specific or preferential promoter is one that directs expression specifically or preferentially in seed tissues. Such promoters can be, for example, ovule-specific, embryo-specific, endosperm-specific, integument-specific, seed coat-specific, or some combination thereof. Examples include a promoter from the ovule-specific BEL1 gene described in Reiser et al., 1995 (GENBANK® Accession No. U39944). Non-limiting examples of seed specific promoters are derived from the following genes: MAC1 from maize (Sheridan et al., 1996), Cat3 from maize (GENBANK® Accession No. L05934; Abler et al., 1993), the gene encoding oleosin 18 kD from maize (GENBANK® Accession No. J05212; Lee et al., 1994), vivparous-1 from Arabidopsis (GENBANK® Accession No. U93215), the gene encoding oleosin from Arabidopsis (GENBANK® Accession No. Z17657), Atmycl from Arabidopsis (Urao et al., 1996), the 2s seed storage protein gene family from Arabidopsis (Conceicao et al., 1994) the gene encoding oleosin 20 kD from Brassica napus (GENBANK® Accession No. M63985), napA from Brassica napus (GENBANK® Accession No. J02798; Josefsson et al., 1987), the napin gene family from Brassica napus (Sjodahl et al., 1995), the gene encoding the 2S storage protein from Brassica napus (Dasgupta et al., 1993), the genes encoding oleosin A (GENBANK® Accession No. U09118) and oleosin B (GENBANK® Accession No. U09119) from soybean, and the gene encoding low molecular weight sulphur rich protein from soybean (Choi et al., 1995).

[0239] Alternatively, particular sequences that provide the promoter with desirable expression characteristics, or the promoter with expression enhancement activity, could be identified and these or similar sequences introduced into the sequences via cloning or via mutation. It is further contemplated that these sequences can be mutagenized in order to enhance the expression of transgenes in a particular species.

[0240] Furthermore, it is contemplated that promoters combining elements from more than one promoter can be employed. For example, U.S. Pat. No. 5,491,288 discloses combining a Cauliflower Mosaic Virus (CaMV) promoter with a histone promoter. Thus, the elements from the promoters disclosed herein can be combined with elements from other promoters.

[0241] a. Constitutive Expression: The Ubiguitin Promoter

[0242] Ubiquitin is a gene product known to accumulate in many cell types and its promoter has been cloned from several species for use in transgenic plants (e.g., sunflower—Binet et al., 1991; maize—Christensen et al., 1989; and Arabidopsis—Callis et al., 1990; Norris et al., 1993). The maize ubiquitin promoter has been developed in transgenic monocot systems and its sequence and vectors constructed for monocot transformation are disclosed in the patent publication EP 0 342 926 (to Lubrizol) which is herein incorporated by reference. Taylor et al., 1993, describes a vector (pAHC25) that comprises the maize ubiquitin promoter and first intron and its high activity in cell suspensions of numerous monocotyledons when introduced via microprojectile bombardment. The Arabidopsis ubiquitin promoter is suitable for use with the nucleotide sequences of the presently disclosed subject matter. The ubiquitin promoter is suitable for gene expression in transgenic plants, both monocotyledons and dicotyledons. Suitable vectors are derivatives of pAHC25 or any of the transformation vectors disclosed herein, modified by the introduction of the appropriate ubiquitin promoter and/or intron sequences.

[0243] b. Constitutive Expression: The CaMV 35S Promoter

[0244] Construction of the plasmid pCGN1761 is disclosed in the published patent application EP 0 392 225 (Example 23), which is hereby incorporated by reference. pCGN1761 contains the “double” CaMV 35S promoter and the tml transcriptional terminator with a unique EcoRI site between the promoter and the terminator and has a pUC-type backbone. A derivative of pCGN1761 is constructed which has a modified polylinker that includes NotI and XhoI sites in addition to the existing EcoRI site. This derivative is designated pCGN1761ENX. pCGN1761ENX is useful for the cloning of cDNA sequences or coding sequences (including microbial ORF sequences) within its polylinker for the purpose of their expression under the control of the 35S promoter in transgenic plants. The entire 35S promoter-coding sequence-tml terminator cassette of such a construction can be excised by HindIII, SphI, SalI, and XbaI sites 5′ to the promoter and XbaI, BamHI and BglI sites 3′ to the terminator for transfer to transformation vectors such as those disclosed below. Furthermore, the double 35S promoter fragment can be removed by 5′ excision with HindIII, SphI, SalI, XbaI, or PstI, and 3′ excision with any of the polylinker restriction sites (EcoRI, NotI or XhoI) for replacement with another promoter. If desired, modifications around the cloning sites can be made by the introduction of sequences that can enhance translation. This is particularly useful when overexpression is desired. For example, pCGN1761ENX can be modified by optimization of the translational initiation site as disclosed in Example 37 of U.S. Pat. No. 5,639,949, incorporated herein by reference.

[0245] c. Constitutive Expression: The Actin Promoter

[0246] Several isoforms of actin are known to be expressed in most cell types and consequently the actin promoter can be used as a constitutive promoter. In particular, the promoter from the rice ActI gene has been cloned and characterized (McElroy et al., 1990). A 1.3 kilobase (kb) fragment of the promoter was found to contain all the regulatory elements required for expression in rice protoplasts. Furthermore, numerous expression vectors based on the ActI promoter have been constructed specifically for use in monocotyledons (McElroy et al., 1991). These incorporate the ActI-intron 1, AdhI 5′ flanking sequence (from the maize alcohol dehydrogenase gene) and AdhI-intron 1 and sequence from the CaMV 35S promoter. Vectors showing highest expression were fusions of 35S and ActI intron or the ActI 5′ flanking sequence and the ActI intron. Optimization of sequences around the initiating ATG (of the β-glucuronidase (GUS) reporter gene) also enhanced expression. The promoter expression cassettes disclosed in McElroy et al., 1991, can be easily modified for gene expression and are particularly suitable for use in monocotyledonous hosts. For example, promoter-containing fragments are removed from the McElroy constructions and used to replace the double 35S promoter in pCGN1761ENX, which is then available for the insertion of specific gene sequences. The fusion genes thus constructed can then be transferred to appropriate transformation vectors. In a separate report, the rice ActI promoter with its first intron has also been found to direct high expression in cultured barley cells (Chibbar et al., 1993).

[0247] d. Inducible Expression: PR-1 Promoters

[0248] The double 35S promoter in pCGN1761ENX can be replaced with any other promoter of choice that will result in suitably high expression levels. By way of example, one of the chemically regulatable promoters disclosed in U.S. Pat. No. 5,614,395, such as the tobacco PR-1a promoter, can replace the double 35S promoter. Alternately, the Arabidopsis PR-1 promoter disclosed in Lebel et al., 1998, can be used. The promoter of choice can be excised from its source by restriction enzymes, but can alternatively be PCR-amplified using primers that carry appropriate terminal restriction sites. Should PCR-amplification be undertaken, the promoter can be re-sequenced to check for amplification errors after the cloning of the amplified promoter in the target vector. The chemically/pathogen regulatable tobacco PR-1a promoter is cleaved from plasmid pCIB1004 (for construction, see example 21 of EP 0 332 104, which is hereby incorporated by reference) and transferred to plasmid pCGN1761ENX (Uknes et al., 1992). pCIB1004 is cleaved with NcoI and the resulting 3′ overhang of the linearized fragment is rendered blunt by treatment with T4 DNA polymerase. The fragment is then cleaved with HindIII and the resultant PR-1a promoter-containing fragment is gel purified and cloned into pCGN1761ENX from which the double 35S promoter has been removed. This is accomplished by cleavage with XhoI and blunting with T4 polymerase, followed by cleavage with HindIII, and isolation of the larger vector-terminator containing fragment into which the pCIB1004 promoter fragment is cloned. This generates a PCGN1761ENX derivative with the PR-1a promoter and the tml terminator and an intervening polylinker with unique EcoRI and NotI sites. The selected coding sequence can be inserted into this vector, and the fusion products (i.e. promoter-gene-terminator) can subsequently be transferred to any selected transformation vector, including those disclosed herein. Various chemical regulators can be employed to induce expression of the selected coding sequence in the plants transformed according to the presently disclosed subject matter, including the benzothiadiazole, isonicotinic acid, and salicylic acid compounds disclosed in U.S. Pat. Nos. 5,523,311 and 5,614,395.

[0249] e. Inducible Expression: An Ethanol-Inducible Promoter

[0250] A promoter inducible by certain alcohols or ketones, such as ethanol, can also be used to confer inducible expression of a coding sequence of the presently disclosed subject matter. Such a promoter is for example the alcA gene promoter from Aspergillus nidulans (Caddick et al., 1998). In A. nidulans, the alcA gene encodes alcohol dehydrogenase I, the expression of which is regulated by the AlcR transcription factors in presence of the chemical inducer. For the purposes of the presently disclosed subject matter, the CAT coding sequences in plasmid palcA:CAT comprising a alcA gene promoter sequence fused to a minimal 35S promoter (Caddick et al., 1998) are replaced by a coding sequence of the presently disclosed subject matter to form an expression cassette having the coding sequence under the control of the alcA gene promoter. This is carried out using methods known in the art.

[0251] f. Inducible Expression: A Glucocorticoid-Inducible Promoter

[0252] Induction of expression of a nucleic acid sequence of the presently disclosed subject matter using systems based on steroid hormones is also provided. For example, a glucocorticoid-mediated induction system is used (Aoyama & Chua, 1997) and gene expression is induced by application of a glucocorticoid, for example a synthetic glucocorticoid, for example dexamethasone, at a concentration ranging in one embodiment from 0.1 mM to 1 mM, and in another embodiment from 10 mM to 100 mM. For the purposes of the presently disclosed subject matter, the luciferase gene sequences Aoyama & Chua are replaced by a nucleic acid sequence of the presently disclosed subject matter to form an expression cassette having a nucleic acid sequence of the presently disclosed subject matter under the control of six copies of the GAL4 upstream activating sequences fused to the 35S minimal promoter. This is carried out using methods known in the art. The trans-acting factor comprises the GAL4 DNA-binding domain (Keegan et al., 1986) fused to the transactivating domain of the herpes viral polypeptide VP16 (Triezenberg et al., 1988) fused to the hormone-binding domain of the rat glucocorticoid receptor (Picard et al., 1988). The expression of the fusion polypeptide is controlled either by a promoter known in the art or disclosed herein. A plant comprising an expression cassette comprising a nucleic acid sequence of the presently disclosed subject matter fused to the 6×GAL4/minimal promoter is also provided. Thus, tissue- or organ-specificity of the fusion polypeptide is achieved leading to inducible tissue- or organ-specificity of the nucleic acid sequence to be expressed.

[0253] g. Root Specific Expression

[0254] Another pattern of gene expression is root expression. A suitable root promoter is the promoter of the maize metallothionein-like (MTL) gene disclosed in de Framond, 1991, and also in U.S. Pat. No. 5,466,785, each of which is incorporated herein by reference. This “MTL” promoter is transferred to a suitable vector such as pCGN1761ENX for the insertion of a selected gene and subsequent transfer of the entire promoter-gene-terminator cassette to a transformation vector of interest.

[0255] h. Wound-Inducible Promoters

[0256] Wound-inducible promoters can also be suitable for gene expression. Numerous such promoters have been disclosed (e.g., Xu et al., 1993; Logemann et al., 1989; Rohrmeier & Lehle, 1993; Firek et al., 1993; Warner et al., 1993) and all are suitable for use with the presently disclosed subject matter. Logemann et al. describe the 5′ upstream sequences of the dicotyledonous potato wunI gene. Xu et al. show that a wound-inducible promoter from the dicotyledon potato (pin2) is active in the monocotyledon rice. Further, Rohrmeier & Lehle describe the cloning of the maize WipI cDNA that is wound induced and which can be used to isolate the cognate promoter using standard techniques. Similarly, Firek et al. and Warner et al. have disclosed a wound-induced gene from the monocotyledon Asparagus officinalis, which is expressed at local wound and pathogen invasion sites. Using cloning techniques well known in the art, these promoters can be transferred to suitable vectors, fused to the genes pertaining to the presently disclosed subject matter, and used to express these genes at the sites of plant wounding.

[0257] i. Pith-Preferred Expression

[0258] PCT International Publication WO 93/07278, which is herein incorporated by reference, describes the isolation of the maize trpA gene, which is preferentially expressed in pith cells. The gene sequence and promoter extending up to −1726 basepairs (bp) from the start of transcription are presented. Using standard molecular biological techniques, this promoter, or parts thereof, can be transferred to a vector such as pCGN1761 where it can replace the 35S promoter and be used to drive the expression of a foreign gene in a pith-preferred manner. In fact, fragments containing the pith-preferred promoter or parts thereof can be transferred to any vector and modified for utility in transgenic plants.

[0259] j. Leaf-Specific Expression

[0260] A maize gene encoding phosphoenol carboxylase (PEPC) has been disclosed by Hudspeth & Grula, 1989. Using standard molecular biological techniques, the promoter for this gene can be used to drive the expression of any gene in a leaf-specific manner in transgenic plants.

[0261] k. Pollen-Specific Expression

[0262] WO 93/07278 describes the isolation of the maize calcium-dependent protein kinase (CDPK) gene that is expressed in pollen cells. The gene sequence and promoter extend up to 1400 bp from the start of transcription. Using standard molecular biological techniques, this promoter or parts thereof can be transferred to a vector such as pCGN1761 where it can replace the 35S promoter and be used to drive the expression of a nucleic acid sequence of the presently disclosed subject matter in a pollen-specific manner.

[0263] 2. Transcriptional Terminators

[0264] A variety of 5′ and 3′ transcriptional regulatory sequences are available for use in the presently disclosed subject matter. Transcriptional terminators are responsible for the termination of transcription and correct mRNA polyadenylation. The 3′ nontranslated regulatory DNA sequence includes from in one embodiment about 50 to about 1,000, and in another embodiment about 100 to about 1,000, nucleotide base pairs and contains plant transcriptional and translational termination sequences. Appropriate transcriptional terminators and those that are known to function in plants include the CaMV 35S terminator, the tml terminator, the nopaline synthase terminator, the pea rbcS E9 terminator, the terminator for the T7 transcript from the octopine synthase gene of Agrobacterium tumefaciens, and the 3′ end of the protease inhibitor I or II genes from potato or tomato, although other 3′ elements known to those of skill in the art can also be employed. Alternatively, a gamma coixin, oleosin 3, or other terminator from the genus Coix can be used.

[0265] Non-limiting 3′ elements include those from the nopaline synthase gene of Agrobacterium tumefaciens (Bevan et al., 1983), the terminator for the T7 transcript from the octopine synthase gene of Agrobacterium tumefaciens, and the 3′ end of the protease inhibitor I or II genes from potato or tomato.

[0266] As the DNA sequence between the transcription initiation site and the start of the coding sequence (i.e., the untranslated leader sequence, also referred to as the 5′ untranslated region) can influence gene expression, a particular leader sequence can also be employed. Non-limiting leader sequences are contemplated to include those that include sequences predicted to direct optimum expression of the operatively linked gene; i.e., to include a consensus leader sequence that can increase or maintain mRNA stability and prevent inappropriate initiation of translation. The choice of such sequences will be known to those of skill in the art in light of the present disclosure. Sequences that are derived from genes that are highly expressed in plants are useful in the presently disclosed subject matter.

[0267] Thus, a variety of transcriptional terminators are available for use in expression cassettes. These are responsible for termination of transcription and correct mRNA polyadenylation. Appropriate transcriptional terminators are those that are known to function in plants and include the CaMV 35S terminator, the tml terminator, the nopaline synthase terminator, and the pea rbcS E9 terminator. These can be used in both monocotyledons and dicotyledons. In addition, a gene's native transcription terminator can be used.

[0268] 3. Other Sequences for the Enhancement or Regulation of Expression

[0269] Numerous sequences have been found to enhance gene expression from within the transcriptional unit and these sequences can be used in conjunction with the genes of the presently disclosed subject matter to increase their expression in transgenic plants.

[0270] Other sequences that have been found to enhance gene expression in transgenic plants include intron sequences (e.g., from Adh1, bronze1, actin1, actin 2 (PCT International Publication No. WO 00/760067), or the sucrose synthase intron), and viral leader sequences (e.g., from Tobacco Mosaic Virus (TMV), Maize Chlorotic Mottle Virus (MCMV), or Alfalfa Mosaic Virus (AMV)). For example, a number of non-translated leader sequences derived from viruses are known to enhance the expression of operatively linked nucleic acids. Specifically, leader sequences from Tobacco Mosaic Virus (TMV), Maize Chlorotic Mottle Virus (MCMV), and Alfalfa Mosaic Virus (AMV) have been shown to be effective in enhancing expression (e.g., Gallie et al., 1987; Skuzeski et al., 1990). Other leaders known in the art include, but are not limited to picornavirus leaders, for example, encephalomyocarditis virus (EMCV) leader (encephalomyocarditis 5′ noncoding region; Elroy-Stein et al., 1989); potyvirus leaders (e.g., Tobacco Etch Virus (TEV) leader and Maize Dwarf Mosaic Virus (MDMV) leader); human immunoglobulin heavy-chain binding protein (BiP) leader (Macejak et al., 1991); untranslated leader from the coat protein mRNA of AMV (AMV RNA 4; Jobling et al., 1987); TMV leader (Gallie et al., 1989); and maize chlorotic mottle virus leader (Lommel et al., 1991). See also, Della-Cioppa et al., 1987. Regulatory elements such as Adh intron 1 (Callis et al., 1987), sucrose synthase intron (Vasil et al., 1989) or TMV omega element (Gallie et al., 1989), can further be included where desired. Non-limiting examples of enhancers include elements from the CaMV 35S promoter, octopine synthase genes (Ellis et al., 1987), the rice actin I gene, the maize alcohol dehydrogenase gene (Callis et al., 1987), the maize shrunken I gene (Vasil et al., 1989), TMV omega element (Gallie et al., 1989) and promoters from non-plant eukaryotes (e.g., yeast; Ma et al., 1988).

[0271] A number of non-translated leader sequences derived from viruses are also known to enhance expression, and these are particularly effective in dicotyledonous cells. Specifically, leader sequences from Tobacco Mosaic Virus (TMV; the “W-sequence”), Maize Chlorotic Mottle Virus (MCMV), and Alfalfa Mosaic Virus (AMV) have been shown to be effective in enhancing expression (see e.g., Gallie et al., 1987; Skuzeski et al., 1990). Other leader sequences known in the art include, but are not limited to, picornavirus leaders, for example, EMCV (encephalomyocarditis virus) leader (5′ noncoding region; see Elroy-Stein et al., 1989); potyvirus leaders, for example, from Tobacco Etch Virus (TEV; see Allison et al., 1986); Maize Dwarf Mosaic Virus (MDMV; see Kong & Steinbiss 1998); human immunoglobulin heavy-chain binding polypeptide (BiP) leader (Macejak & Sarnow, 1991); untranslated leader from the coat polypeptide mRNA of alfalfa mosaic virus (AMV; RNA 4; see Jobling & Gehrke, 1987); tobacco mosaic virus (TMV) leader (Gallie et al., 1989); and Maize Chlorotic Mottle Virus (MCMV) leader (Lommel et al., 1991). See also, Della-Cioppa et al., 1987.

[0272] In addition to incorporating one or more of the aforementioned elements into the 5′ regulatory region of a target expression cassette of the presently disclosed subject matter, other elements can also be incorporated. Such elements include, but are not limited to, a minimal promoter. By minimal promoter it is intended that the basal promoter elements are inactive or nearly so in the absence of upstream or downstream activation. Such a promoter has low background activity in plants when there is no transactivator present or when enhancer or response element binding sites are absent. One minimal promoter that is particularly useful for target genes in plants is the Bz1 minimal promoter, which is obtained from the bronze1 gene of maize. The Bz1 core promoter is obtained from the “myc” mutant Bz1-luciferase construct pBz1LucR98 via cleavage at the NheI site located at positions −53 to −58 (Roth et al., 1991). The derived Bz1 core promoter fragment thus extends from positions −53 to +227 and includes the Bz1 intron-1 in the 5′ untranslated region. Also useful for the presently disclosed subject matter is a minimal promoter created by use of a synthetic TATA element. The TATA element allows recognition of the promoter by RNA polymerase factors and confers a basal level of gene expression in the absence of activation (see generally, Mukumoto et al., 1993; Green, 2000.

[0273] 4. Targeting of the Gene Product within the Cell

[0274] Various mechanisms for targeting gene products are known to exist in plants and the sequences controlling the functioning of these mechanisms have been characterized in some detail. For example, the targeting of gene products to the chloroplast is controlled by a signal sequence found at the amino terminal end of various polypeptides that is cleaved during chloroplast import to yield the mature polypeptides (see e.g., Comai et al., 1988). These signal sequences can be fused to heterologous gene products to affect the import of heterologous products into the chloroplast (Van den Broeck et al., 1985). DNA encoding for appropriate signal sequences can be isolated from the 5′ end of the cDNAs encoding the ribulose-1,5-bisphosphate carboxylase/oxygenase (RUBISCO) polypeptide, the chlorophyll a/b binding (CAB) polypeptide, the 5-enol-pyruvyl shikimate-3-phosphate (EPSP) synthase enzyme, the GS2 polypeptide and many other polypeptides which are known to be chloroplast localized. See also, the section entitled “Expression With Chloroplast Targeting” in Example 37 of U.S. Pat. No. 5,639,949, herein incorporated by reference.

[0275] Other gene products can be localized to other organelles such as the mitochondrion and the peroxisome (e.g., Unger et al., 1989). The cDNAs encoding these products can also be manipulated to effect the targeting of heterologous gene products to these organelles. Examples of such sequences are the nuclear-encoded ATPases and specific aspartate amino transferase isoforms for mitochondria. Targeting cellular polypeptide bodies has been disclosed by Rogers et al., 1985.

[0276] In addition, sequences have been characterized that control the targeting of gene products to other cell compartments. Amino terminal sequences are responsible for targeting to the endoplasmic reticulum (ER), the apoplast, and extracellular secretion from aleurone cells (Koehler & Ho, 1990). Additionally, amino terminal sequences in conjunction with carboxy terminal sequences are responsible for vacuolar targeting of gene products (Shinshi et al., 1990).

[0277] By the fusion of the appropriate targeting sequences disclosed above to transgene sequences of interest it is possible to direct the transgene product to any organelle or cell compartment. For chloroplast targeting, for example, the chloroplast signal sequence from the RUBISCO gene, the CAB gene, the EPSP synthase gene, or the GS2 gene is fused in frame to the amino terminal ATG of the transgene. The signal sequence selected can include the known cleavage site, and the fusion constructed can take into account any amino acids after the cleavage site that are required for cleavage. In some cases this requirement can be fulfilled by the addition of a small number of amino acids between the cleavage site and the transgene ATG or, alternatively, replacement of some amino acids within the transgene sequence. Fusions constructed for chloroplast import can be tested for efficacy of chloroplast uptake by in vitro translation of in vitro transcribed constructions followed by in vitro chloroplast uptake using techniques disclosed by Bartlett et al., 1982 and Wasmann et al., 1986. These construction techniques are well known in the art and are equally applicable to mitochondria and peroxisomes.

[0278] The above-disclosed mechanisms for cellular targeting can be utilized not only in conjunction with their cognate promoters, but also in conjunction with heterologous promoters so as to effect a specific cell-targeting goal under the transcriptional regulation of a promoter that has an expression pattern different from that of the promoter from which the targeting signal derives.

D. Construction of Plant Transformation Vectors

[0279] 1. Introduction

[0280] Numerous transformation vectors available for plant transformation are known to those of ordinary skill in the plant transformation art, and the genes pertinent to the presently disclosed subject matter can be used in conjunction with any such vectors. The selection of vector will depend upon the selected transformation technique and the target species for transformation. For certain target species, different antibiotic or herbicide selection markers might be employed. Selection markers used routinely in transformation include the nptII gene, which confers resistance to kanamycin and related antibiotics (Messing & Vieira, 1982; Bevan et al., 1983); the bar gene, which confers resistance to the herbicide phosphinothricin (White et al., 1990; Spencer et al., 1990); the hph gene, which confers resistance to the antibiotic hygromycin (Blochinger & Diggelmann, 1984); the dhfr gene, which confers resistance to methotrexate (Bourouis & Jarry, 1983); the EPSP synthase gene, which confers resistance to glyphosate (U.S. Pat. Nos. 4,940,935 and 5,188,642); and the mannose-6-phosphate isomerase gene, which provides the ability to metabolize mannose (U.S. Pat. Nos. 5,767,378 and 5,994,629).

[0281] The compositions of the presently disclosed subject matter include plant nucleic acid molecules, and the amino acid sequences of the polypeptides or partial-length polypeptides encoded by nucleic acid molecules comprising an open reading frame. These sequences can be employed to alter the expression of a particular gene corresponding to the open reading frame by decreasing or eliminating expression of that plant gene or by overexpressing a particular gene product. Methods of this embodiment of the presently disclosed subject matter include stably transforming a plant with a nucleic acid molecule of the presently disclosed subject matter that includes an open reading frame operatively linked to a promoter capable of driving expression of that open reading frame (sense or antisense) in a plant cell. By “portion” or “fragment”, as it relates to a nucleic acid molecule that comprises an open reading frame or a fragment thereof encoding a partial-length polypeptide having the activity of the full length polypeptide, is meant a sequence having in one embodiment at least 80 nucleotides, in another embodiment at least 150 nucleotides, and in still another embodiment at least 400 nucleotides. If not employed for expression, a “portion” or “fragment” means in representative embodiments at least 9, or 12, or 15, or at least 20, consecutive nucleotides (e.g., probes and primers or other oligonucleotides) corresponding to the nucleotide sequence of the nucleic acid molecules of the presently disclosed subject matter. Thus, to express a particular gene product, the method comprises introducing into a plant, plant cell, or plant tissue an expression cassette comprising a promoter operatively linked to an open reading frame so as to yield a transformed differentiated plant, transformed cell, or transformed tissue. Transformed cells or tissue can be regenerated to provide a transformed differentiated plant. The transformed differentiated plant or cells thereof can express the open reading frame in an amount that alters the amount of the gene product in the plant or cells thereof, which product is encoded by the open reading frame. The presently disclosed subject matter also provides a transformed plant prepared by the methodsa disclosed herein, as well as progeny and seed thereof.

[0282] The presently disclosed subject matter further includes a nucleotide sequence that is complementary to one (hereinafter “test” sequence) that hybridizes under stringent conditions to a nucleic acid molecule of the presently disclosed subject matter, as well as an RNA molecule that is transcribed from the nucleic acid molecule. When hybridization is performed under stringent conditions, either the test or nucleic acid molecule of presently disclosed subject matter can be present on a support: e.g., on a membrane or on a DNA chip. Thus, either a denatured test or nucleic acid molecule of the presently disclosed subject matter is first bound to a support and hybridization is effected for a specified period of time at a temperature of, in one embodiment, between 55° C. and 70° C., in 2×SSC containing 0.1% SDS, followed by rinsing the support at the same temperature but with a buffer having a reduced SSC concentration. Depending upon the degree of stringency required, such reduced concentration buffers are typically 1×SSC containing 0.1% SDS, 0.5×SSC containing 0.1% SDS, or 0.1×SSC containing 0.1% SDS.

[0283] In a further embodiment, the presently disclosed subject matter provides a transformed plant host cell, or one obtained through breeding, capable of over-expressing, under-expressing, or having a knockout of a polypeptide-encoding gene and/or its gene product(s). The plant cell is transformed with at least one such expression vector wherein the plant host cell can be used to regenerate plant tissue or an entire plant, or seed there from, in which the effects of expression, including overexpression and underexpression, of the introduced sequence or sequences can be measured in vitro or in planta.

[0284] In another aspect, the presently disclosed subject matter features an isolated stress-related polypeptide, wherein the polypeptide binds to a fragment of a protein selected from the group consisting of OsGF14-c (SEQ ID NO: 113), OsDAD1 (SEQ ID NO: 128), Os006819-2510 (SEQ ID NO: 20), OsCRTC (SEQ ID NO: 134), OsSGT1 (SEQ ID NO: 144), OsERP (SEQ ID NO: 146), OsCHIB1 (SEQ ID NO: 152), OsCS (SEQ ID NO: 156), OsPP2A-2 (SEQ ID NO: 164), and OsCAA90866 (SEQ ID NO: 170). In some embodiments, the presently disclosed subject matter features an isolated polypeptide comprising or consisting of an amino acid sequence substantially similar to the amino acid sequence of an isolated stress-related polypeptide of the presently disclosed subject matter.

[0285] Because the proteins of the presently disclosed subject matter have a roll in stress response, in certain embodiments, a cell introduced with a nucleic acid molecule of the presently disclosed subject matter has a different stress response as compared to a cell not introduced with the nucleic acid molecule.

[0286] In another aspect, the presently disclosed subject matter features a method for modulating stress response of a plant cell comprising introducing an isolated nucleic acid molecule encoding a stress-related polypeptide into the plant cell, wherein the polypeptide binds to a fragment of a protein selected from the group consisting of OsGF14-c (SEQ ID NO: 113), OsDAD1 (SEQ ID NO: 128), Os006819-2510 (SEQ ID NO: 20), OsCRTC (SEQ ID NO: 134), OsSGT1 (SEQ ID NO: 144), OsERP (SEQ ID NO: 146), OsCHIB1 (SEQ ID NO: 152), OsCS (SEQ ID NO: 156), OsPP2A-2 (SEQ ID NO: 164), and OsCAA90866 (SEQ ID NO: 170), wherein the polypeptide is expressed by the cell.

[0287] In another aspect, the presently disclosed subject matter features a method for modulating stress response of a plant cell comprising introducing an isolated nucleic acid molecule encoding a stress-related polypeptide into the plant cell, wherein the polypeptide binds to a fragment of a protein selected from the group consisting of OsGF14-c (SEQ ID NO: 113), OsDAD1 (SEQ ID NO: 128), Os006819-2510 (SEQ ID NO: 20), OsCRTC (SEQ ID NO: 134), OsSGT1 (SEQ ID NO: 144), OsERP (SEQ ID NO: 146), OsCHIB1 (SEQ ID NO: 152), OsCS (SEQ ID NO: 156), OsPP2A-2 (SEQ ID NO: 164), and OsCAA90866 (SEQ ID NO: 170), wherein expression of the polypeptide encoded by the nucleic acid molecule is reduced in the cell.

[0288] As discussed herein, the stress-related proteins described herein affect stress response (e.g., when the plant is exposed to biotic or abiotic stress). Accordingly, by changing the amount of a stress-related protein of the presently disclosed subject matter in a plant cell, the stress respsone of that plant cell can be modulated.

[0289] In some situations, increasing expression of a stress-related protein of the presently disclosed subject matter in a cell will cause that cell to increase its stress response (in some cases, rate of proliferation). In other situations, increasing expression of a stress-related protein of the presently disclosed subject matter in a cell causes that cell to reduce its stress response (in some cases, rate of proliferation). Similarly, decreasing the expression of a stress-related protein of the presently disclosed subject matter in a cell can increase or decrease that cell's stress response (in some cases, rate of proliferation). What is relevant is that the stress response of the cell changes if the level of expression of a stress-related protein of the presently disclosed subject matter is either increased or decreased.

[0290] Increasing the level of expression of a stress-related protein of the presently disclosed subject matter in a cell is a relatively simple matter. For example, overexpression of the protein can be accomplished by transforming the cell with a nucleic acid molecule encoding the protein according to standard methods such as those described above.

[0291] Once a nucleic acid sequence of the presently disclosed subject matter has been cloned into an expression system, it is transformed into a plant cell. The receptor and target expression cassettes of the presently disclosed subject matter can be introduced into the plant cell in a number of art-recognized ways. Methods for regeneration of plants are also well known in the art. For example, Ti plasmid vectors have been utilized for the delivery of foreign DNA, as well as direct DNA uptake, liposomes, electroporation, microinjection, and microprojectiles. In addition, bacteria from the genus Agrobacterium can be utilized to transform plant cells. Below are descriptions of representative techniques for transforming both dicotyledonous and monocotyledonous plants, as well as a representative plastid transformation technique.

[0292] Transformation of a plant can be undertaken with a single DNA molecule or multiple DNA molecules (i.e., co-transformation), and both these techniques are suitable for use with the expression cassettes of the presently disclosed subject matter. Numerous transformation vectors are available for plant transformation, and the expression cassettes of the presently disclosed subject matter can be used in conjunction with any such vectors. The selection of vector will depend upon the transformation technique and the species targeted for transformation.

[0293] A variety of techniques are available and known for introduction of nucleic acid molecules and expression cassettes comprising such nucleic acid molecules into a plant cell host. These techniques include, but are not limited to transformation with DNA employing A. tumefaciens or A. rhizogenes as the transforming agent, liposomes, PEG precipitation, electroporation, DNA injection, direct DNA uptake, microprojectile bombardment, particle acceleration, and the like (see e.g., EP 0 295 959 and EP 0 138 341; see also below). However, cells other than plant cells can be transformed with the expression cassettes of the presently disclosed subject matter. A general descriptions of plant expression vectors and reporter genes, and Agrobacterium and Agrobacterium-mediated gene transfer, can be found in Gruber et al., 1993, incorporated herein by reference in its entirety.

[0294] Expression vectors containing genomic or synthetic fragments can be introduced into protoplasts or into intact tissues or isolated cells. In some embodiments, expression vectors are introduced into intact tissue. “Plant tissue” includes differentiated and undifferentiated tissues or entire plants, including but not limited to roots, stems, shoots, leaves, pollen, seeds, tumor tissue, and various forms of cells and cultures such as single cells, protoplasts, embryos, and callus tissues. The plant tissue can be in plants or in organ, tissue, or cell culture. General methods of culturing plant tissues are provided, for example, by Maki et al., 1993 and by Phillips et al. 1988. In some embodiments, expression vectors are introduced into maize or other plant tissues using a direct gene transfer method such as microprojectile-mediated delivery, DNA injection, electroporation, or the like. In some embodiments, expression vectors are introduced into plant tissues using microprojectile media delivery with a biolistic device (see e.g., Tomes et al., 1995). The vectors of the presently disclosed subject matter can not only be used for expression of structural genes but can also be used in exon-trap cloning or in promoter trap procedures to detect differential gene expression in varieties of tissues (Lindsey et al., 1993; Auch & Reth, 1990).

[0295] In some embodiments, the binary type vectors of the Ti and Ri plasmids of Agrobacterium spp are employed. Ti-derived vectors can be used to transform a wide variety of higher plants, including monocotyledonous and dicotyledonous plants including, but not limited to soybean, cotton, rape, tobacco, and rice (Pacciotti et al., 1985: Byrne et al., 1987; Sukhapinda et al., 1987; Lorz et al., 1985; Potrykus, 1985; Park et al., 1985: Hiei et al., 1994). The use of T-DNA to transform plant cells has received extensive study and is amply described (European Patent Application No. EP 0 120 516; Hoekema, 1985; Knauf et al., 1983; and An et al., 1985, each of which is incorporated by reference in its entirety). For introduction into plants, the nucleic acid molecules of the presently disclosed subject matter can be inserted into binary vectors as described in the examples.

[0296] Other transformation methods are available to those skilled in the art, such as direct uptake of foreign DNA constructs (see European Patent Application No. EP 0 295 959), electroporation (Fromm et al., 1986), or high velocity ballistic bombardment of plant cells with metal particles coated with the nucleic acid constructs (Kline et al., 1987; U.S. Pat. No. 4,945,050). Once transformed, the cells can be regenerated using techniques familiar to those of skill in the art. Of particular relevance are the recently described methods to transform foreign genes into commercially important crops, such as rapeseed (De Block et al., 1989), sunflower (Everett et al., 1987), soybean (McCabe et al., 1988; Hinchee et al., 1988; Chee et al., 1989; Christou et al., 1989; European Patent Application No. EP 0 301 749), rice (Hiei et al., 1994), and corn (Gordon Kamm et al., 1990; Fromm et al., 1990).

[0297] Of course, the choice of method might depend on the type of plant, i.e., monocotyledonous or dicotyledonous, targeted for transformation. Suitable methods of transforming plant cells include, but are not limited to microinjection (Crossway et al., 1986), electroporation (Riggs et al., 1986), Agrobacterium-mediated transformation (Hinchee et al., 1988), direct gene transfer (Paszkowski et al., 1984), and ballistic particle acceleration using devices available from Agracetus, Inc. (Madison, Wis., United States of America) and BioRad (Hercules, Calif., United States of America). See e.g., U.S. Pat. No. 4,945,050; McCabe et al., 1988; Weissinger et al., 1988; Sanford et al., 1987 (onion); Christou et al., 1988 (soybean); McCabe et al., 1988 (soybean); Datta et al., 1990 (rice); Klein et al., 1988 (maize); Fromm et al., 1990 (maize); Gordon-Kamm et al., 1990 (maize); Svab et al., 1990 (tobacco chloroplast); Koziel et al., 1993 (maize); Shimamoto et al., 1989 (rice); Christou et al., 1991 (rice); European Patent Application EP 0 332 581 (orchardgrass and other Pooideae); Vasil et al., 1993 (wheat); Weeks et al., 1993 (wheat). In one embodiment, the protoplast transformation method for maize is employed (see European Patent Application EP 0 292 435; U.S. Pat. No. 5,350,689).

[0298] 2. Vectors Suitable for Agrobacterium Transformation

[0299] Agrobacterium tumefaciens cells containing a vector comprising an expression cassette of the presently disclosed subject matter, wherein the vector comprises a Ti plasmid, are useful in methods of making transformed plants. Plant cells are infected with an Agrobacterium tumefaciens as described above to produce a transformed plant cell, and then a plant is regenerated from the transformed plant cell. Numerous Agrobacterium vector systems useful in carrying out the presently disclosed subject matter are known to ordinary skill in the art.

[0300] Many vectors are available for transformation using Agrobacterium tumefaciens. These typically carry at least one T-DNA border sequence and include vectors such as pBIN19 (Bevan, 1984). Below, the construction of two typical vectors suitable for Agrobacterium transformation is disclosed.

[0301] a. pCIB200 and pCIB2001

[0302] The binary vectors pCIB200 and pCIB2001 are used for the construction of recombinant vectors for use with Agrobacterium and are constructed in the following manner. pTJS75kan is created by NarI digestion of pTJS75 (Schmidhauser & Helinski, 1985) allowing excision of the tetracycline-resistance gene, followed by insertion of an AccI fragment from pUC4K carrying an NPTII sequence (Messing & Vieira, 1982: Bevan et al., 1983: McBride & Summerfelt, 1990). XhoI linkers are ligated to the EcoRV fragment of PCIB7 which contains the left and right T-DNA borders, a plant selectable nos/nptII chimeric gene and the pUC polylinker (Rothstein et al., 1987), and the XhoI-digested fragment are cloned into SalI-digested pTJS75kan to create pCIB200 (see also EP 0 332 104, example 19). pCIB200 contains the following unique polylinker restriction sites: EcoRI, SstI, KpnI, BglII, XbaI, and SalI. pCIB2001 is a derivative of pCIB200 created by the insertion into the polylinker of additional restriction sites. Unique restriction sites in the polylinker of pCIB2001 are EcoRI, SstI, KpnI, BglII, XbaI, SalI, MluI, BclI, AvrII, ApaI, HpaI, and StuI. pCIB2001, in addition to containing these unique restriction sites, also has plant and bacterial kanamycin selection, left and right T-DNA borders for Agrobacterium-mediated transformation, the RK2-derived trfA function for mobilization between E. coli and other hosts, and the OriT and OriV functions also from RK2. The pCIB2001 polylinker is suitable for the cloning of plant expression cassettes containing their own regulatory signals.

[0303] b. DCIB10 and Hygromycin Selection Derivatives Thereof

[0304] The binary vector pCIB10 contains a gene encoding kanamycin resistance for selection in plants, T-DNA right and left border sequences, and incorporates sequences from the wide host-range plasmid pRK252 allowing it to replicate in both E. coli and Agrobacterium. Its construction is disclosed by Rothstein et al., 1987. Various derivatives of pCIB10 can be constructed which incorporate the gene for hygromycin B phosphotransferase disclosed by Gritz & Davies, 1983. These derivatives enable selection of transgenic plant cells on hygromycin only (pCIB743), or hygromycin and kanamycin (pCIB715, pCIB717).

[0305] 3. Vectors Suitable for Non-Agrobacterium Transformation

[0306] Transformation without the use of Agrobacterium tumefaciens circumvents the requirement for T-DNA sequences in the chosen transformation vector, and consequently vectors lacking these sequences can be utilized in addition to vectors such as the ones disclosed above that contain T-DNA sequences. Transformation techniques that do not rely on Agrobacterium include transformation via particle bombardment, protoplast uptake (e.g., polyethylene glycol (PEG) and electroporation), and microinjection. The choice of vector depends largely on the species being transformed. Below, the construction of typical vectors suitable for non-Agrobacterium transformation is disclosed.

[0307] a. pCIB3064

[0308] pCIB3064 is a pUC-derived vector suitable for direct gene transfer techniques in combination with selection by the herbicide BASTA® (glufosinate ammonium or phosphinothricin). The plasmid pCIB246 comprises the CaMV 35S promoter in operational fusion to the E. coli β-glucuronidase (GUS) gene and the CaMV 35S transcriptional terminator and is disclosed in the PCT International Publication WO 93/07278. The 35S promoter of this vector contains two ATG sequences 5′ of the start site. These sites are mutated using standard PCR techniques in such a way as to remove the ATGs and generate the restriction sites SspII and PvuII. The new restriction sites are 96 and 37 bp away from the unique SalI site and 101 and 42 bp away from the actual start site. The resultant derivative of pCIB246 is designated pCIB3025. The GUS gene is then excised from pCIB3025 by digestion with SalI and SacI, the termini rendered blunt and religated to generate plasmid pCIB3060. The plasmid pJIT82 is obtained from the John Innes Centre, Norwich, England, and the 400 bp SmaI fragment containing the bar gene from Streptomyces viridochromogenes is excised and inserted into the HpaI site of pCIB3060 (Thompson et al., 1987). This generated pCIB3064, which comprises the bar gene under the control of the CaMV 35S promoter and terminator for herbicide selection, a gene for ampicillin resistance (for selection in E. coli) and a polylinker with the unique sites SphI, PstI, HindIII, and BamHI. This vector is suitable for the cloning of plant expression cassettes containing their own regulatory signals.

[0309] b. pSOG19 and pSOG35

[0310] pSOG35 is a transformation vector that utilizes the E. coli dihydrofolate reductase (DHFR) gene as a selectable marker conferring resistance to methotrexate. PCR is used to amplify the 35S promoter (−800 bp), intron 6 from the maize AdhI gene (−550 bp), and 18 bp of the GUS untranslated leader sequence from pSOG10. A 250-bp fragment encoding the E. coli dihydrofolate reductase type II gene is also amplified by PCR and these two PCR fragments are assembled with a SacI-PstI fragment from pB1221 (BD Biosciences Clontech, Palo Alto, Calif., United States of America) that comprises the pUC19 vector backbone and the nopaline synthase terminator. Assembly of these fragments generates pSOG19 that contains the 35S promoter in fusion with the intron 6 sequence, the GUS leader, the DHFR gene, and the nopaline synthase terminator. Replacement of the GUS leader in pSOG19 with the leader sequence from Maize Chlorotic Mottle Virus (MCMV) generates the vector pSOG35. pSOG19 and pSOG35 carry the pUC gene for ampicillin resistance and have HindIII, SphI, PstI, and EcoRI sites available for the cloning of foreign substances.

[0311] 4. Selectable Markers for Transformation Approaches

[0312] Methods using either a form of direct gene transfer or Agrobacterium-mediated transfer usually, but not necessarily, are undertaken with a selectable marker that can provide resistance to an antibiotic (e.g., kanamycin, hygromycin, or methotrexate) or a herbicide (e.g., phosphinothricin). The choice of selectable marker for plant transformation is not, however, critical to the presently disclosed subject matter.

[0313] For certain plant species, different antibiotic or herbicide selection markers can be employed. Selection markers used routinely in transformation include the nptII gene, which confers resistance to kanamycin and related antibiotics (Messing & Vierra, 1982; Bevan et al., 1983), the bar gene, which confers resistance to the herbicide phosphinothricin (White et al., 1990, Spencer et al., 1990), the hph gene, which confers resistance to the antibiotic hygromycin (Blochinger & Diggelmann, 1984), and the dhfr gene, which confers resistance to methotrexate (Bourouis et al., 1983).

[0314] Selection markers resulting in positive selection, such as a phosphomannose isomerase (PMI) gene (described in PCT International Publication No. WO 93/05163) can also be used. Other genes that can be used for positive selection are described in PCT International Publication No. WO 94/20627 and encode xyloisomerases and phosphomanno-isomerases such as mannose-6-phosphate isomerase and mannose-1-phosphate isomerase; phosphomanno mutase; mannose epimerases such as those that convert carbohydrates to mannose or mannose to carbohydrates such as glucose or galactose; phosphatases such as mannose or xylose phosphatase, mannose-6-phosphatase and mannose-1-phosphatase, and permeases that are involved in the transport of mannose, or a derivative or a precursor thereof, into the cell. An agent is typically used to reduce the toxicity of the compound to the cells, and is typically a glucose derivative such as methyl-3-O-glucose or phloridzin. Transformed cells are identified without damaging or killing the non-transformed cells in the population and without co-introduction of antibiotic or herbicide resistance genes. As described in PCT International Publication No. WO 93/05163, in addition to the fact that the need for antibiotic or herbicide resistance genes is eliminated, it has been shown that the positive selection method is often far more efficient than traditional negative selection.

[0315] As noted above, one vector useful for direct gene transfer techniques in combination with selection by the herbicide BASTA® (or phosphinothricin) is pCIB3064. This vector is based on the plasmid pCIB246, which comprises the CaMV 35S promoter operatively linked to the E. coli β-glucuronidase (GUS) gene and the CaMV 35S transcriptional terminator, and is described in PCT International Publication No. WO 93/07278. One gene useful for conferring resistance to phosphinothricin is the bar gene from Streptomyces viridochromogenes (Thompson et al., 1987). This vector is suitable for the cloning of plant expression cassettes containing their own regulatory signals.

[0316] As noted above, an additional transformation vector is pSOG35, which utilizes the E. coli dihydrofolate reductase (DHFR) gene as a selectable marker conferring resistance to methotrexate. Polymerase chain reaction (PCR) was used to amplify the 35S promoter (about 800 basepairs (bp)), intron 6 from the maize Adh1 gene (about 550 bp), and 18 bp of the GUS untranslated leader sequence from pSOG10. A 250 bp fragment encoding the E. coli dihydrofolate reductase type II gene was also amplified by PCR and these two PCR fragments are assembled with a SacI-PstI fragment from pBI221 (BD Biosciences—Clontech, Palo Alto, Calif., United States of America), which comprised the pUC19 vector backbone and the nopaline synthase terminator. Assembly of these fragments generated pSOG19, which contains the 35S promoter in fusion with the intron 6 sequence, the GUS leader, the DHFR gene and the nopaline synthase terminator. Replacement of the GUS leader in pSOG19 with the leader sequence from Maize Chlorotic Mottle Virus (MCMV) generated the vector pSOG35. pSOG19 and pSOG35 carry the pUC-derived gene for ampicillin resistance, and have HindIII, SphI, PstI and EcoRI sites available for the cloning of foreign sequences.

[0317] Binary backbone vector pNOV2117 contains the T-DNA portion flanked by the right and left border sequences, and including the POSITECH™ (Syngenta Corp., Wilmington, Del., United States of America) plant selectable marker and the “candidate gene” gene expression cassette. The POSITECH™ plant selectable marker confers resistance to mannose and in this instance consists of the maize ubiquitin promoter driving expression of the PMI (phosphomannose isomerase) gene, followed by the cauliflower mosaic virus transcriptional terminator.

[0318] 5. Vector Suitable for Chloroplast Transformation

[0319] For expression of a nucleotide sequence of the presently disclosed subject matter in plant plastids, plastid transformation vector pPH143 (PCT International Publication WO 97/32011, example 36) is used. The nucleotide sequence is inserted into pPH143 thereby replacing the protoporphyrinogen oxidase (Protox) coding sequence. This vector is then used for plastid transformation and selection of transformants for spectinomycin resistance. Alternatively, the nucleotide sequence is inserted in pPH143 so that it replaces the aadH gene. In this case, transformants are selected for resistance to PROTOX inhibitors.

[0320] 6. Transformation of Plastids

[0321] In another embodiment, a nucleotide sequence of the presently disclosed subject matter is directly transformed into the plastid genome. Plastid transformation technology is described in U.S. Pat. Nos. 5,451,513; 5,545,817; and 5,545,818; and in PCT International Publication No. WO 95/16783; and in McBride et al., 1994. The basic technique for chloroplast transformation involves introducing regions of cloned plastid DNA flanking a selectable marker together with the gene of interest into a suitable target tissue, e.g., using biolistics or protoplast transformation (e.g., calcium chloride or PEG mediated transformation). The 1 to 1.5 kilobase (kb) flanking regions, termed targeting sequences, facilitate orthologous recombination with the plastid genome and thus allow the replacement or modification of specific regions of the plastome. Initially, point mutations in the chloroplast 16S rRNA and rps12 genes conferring resistance to spectinomycin and/or streptomycin are utilized as selectable markers for transformation (Svab et al., 1990; Staub et al., 1992). This resulted in stable homoplasmic transformants at a frequency of approximately one per 100 bombardments of target leaves. The presence of cloning sites between these markers allowed creation of a plastid targeting vector for introduction of foreign genes (Staub et al., 1993). Substantial increases in transformation frequency are obtained by replacement of the recessive rRNA or r-protein antibiotic resistance genes with a dominant selectable marker, the bacterial aadA gene encoding the spectinomycin-detoxifying enzyme aminoglycoside-3N-adenyltransferase (Staub et al., 1993). Other selectable markers useful for plastid transformation are known in the art and encompassed within the scope of the presently disclosed subject matter. Typically, approximately 15-20 cell division cycles following transformation are required to reach a homoplastidic state.

[0322] Plastid expression, in which genes are inserted by orthologous recombination into all of the several thousand copies of the circular plastid genome present in each plant cell, takes advantage of the enormous copy number advantage over nuclear-expressed genes to permit expression levels that can readily exceed 10% of the total soluble plant protein. In one embodiment, a nucleotide sequence of the presently disclosed subject matter is inserted into a plastid targeting vector and transformed into the plastid genome of a desired plant host. Plants homoplastic for plastid genomes containing a nucleotide sequence of the presently disclosed subject matter are obtained, and are in one embodiment capable of high expression of the nucleotide sequence.

[0323] An example of plastid transformation follows. Seeds of Nicotiana tabacum c.v. ‘Xanthi nc’ are germinated seven per plate in a 1″ circular array on T agar medium and bombarded 12-14 days after sowing with 1 μm tungsten particles (M10, Biorad, Hercules, Calif., United States of America) coated with DNA from plasmids pPH143 and pPH145 essentially as disclosed (Svab & Maliga, 1993). Bombarded seedlings are incubated on T medium for two days after which leaves are excised and placed abaxial side up in bright light (350-500 μmol photons/m²/s) on plates of RMOP medium (Svab et al., 1990) containing 500 μg/ml spectinomycin dihydrochloride (Sigma, St. Louis, Mo., United States of America). Resistant shoots appearing underneath the bleached leaves three to eight weeks after bombardment are subcloned onto the same selective medium, allowed to form callus, and secondary shoots isolated and subcloned. Complete segregation of transformed plastid genome copies (homoplasmicity) in independent subclones is assessed by standard techniques of Southern blotting (Sambrook & Russell, 2001). BamHI/EcoRI-digested total cellular DNA (Mettler, 1987) is separated on 1% Tris-borate-EDTA (TBE) agarose gels, transferred to nylon membranes (Amersham Biosciences, Piscataway, N.J., United States of America) and probed with ³²P-labeled random primed DNA sequences corresponding to a 0.7 kb BamHI/HindIII DNA fragment from pC8 containing a portion of the rps7/12 plastid targeting sequence. Homoplasmic shoots are rooted aseptically on spectinomycin-containing MS/IBA medium (McBride et al., 1994) and transferred to the greenhouse.

[0324] 7. Transformation of Dicotyledons

[0325] Transformation techniques for dicotyledons are well known in the art and include Agrobacterium-based techniques and techniques that do not require Agrobacterium. Non-Agrobacterium techniques involve the uptake of exogenous genetic material directly by protoplasts or cells. This can be accomplished by PEG or electroporation-mediated uptake, particle bombardment-mediated delivery, or microinjection. Examples of these techniques are disclosed in Paszkowski et al., 1984; Potrykus et al., 1985; Reich et al., 1986; and Klein et al., 1987. In each case the transformed cells are regenerated to whole plants using standard techniques known in the art.

[0326] Agrobacterium-mediated transformation is a useful technique for transformation of dicotyledons because of its high efficiency of transformation and its broad utility with many different species. Agrobacterium transformation typically involves the transfer of the binary vector carrying the foreign DNA of interest (e.g., pCIB200 or pCIB2001) to an appropriate Agrobacterium strain which can depend on the complement of vir genes carried by the host Agrobacterium strain either on a co-resident Ti plasmid or chromosomally (e.g., strain CIB542 for pCIB200 and pCIB2001 (Uknes et al., 1993). The transfer of the recombinant binary vector to Agrobacterium is accomplished by a triparental mating procedure using E. coli carrying the recombinant binary vector, a helper E. coli strain that carries a plasmid such as pRK2013 and which is able to mobilize the recombinant binary vector to the target Agrobacterium strain. Alternatively, the recombinant binary vector can be transferred to Agrobacterium by DNA transformation (Höfgen & Willmitzer, 1988).

[0327] Transformation of the target plant species by recombinant Agrobacterium usually involves co-cultivation of the Agrobacterium with explants from the plant and follows protocols well known in the art. Transformed tissue is regenerated on selectable medium carrying the antibiotic or herbicide resistance marker present between the binary plasmid T-DNA borders.

[0328] Another approach to transforming plant cells with a gene involves propelling inert or biologically active particles at plant tissues and cells. This technique is disclosed in U.S. Pat. Nos. 4,945,050; 5,036,006; and 5,100,792; all to Sanford et al. Generally, this procedure involves propelling inert or biologically active particles at the cells under conditions effective to penetrate the outer surface of the cell and afford incorporation within the interior thereof. When inert particles are utilized, the vector can be introduced into the cell by coating the particles with the vector containing the desired gene. Alternatively, the target cell can be surrounded by the vector so that the vector is carried into the cell by the wake of the particle. Biologically active particles (e.g., dried yeast cells, dried bacterium, or a bacteriophage, each containing DNA sought to be introduced) can also be propelled into plant cell tissue.

[0329] 8. Transformation of Monocotyledons

[0330] Transformation of most monocotyledon species has now also become routine. Exemplary techniques include direct gene transfer into protoplasts using PEG or electroporation, and particle bombardment into callus tissue. Transformations can be undertaken with a single DNA species or multiple DNA species (i.e. co-transformation), and both these techniques are suitable for use with the presently disclosed subject matter. Co-transformation can have the advantage of avoiding complete vector construction and of generating transgenic plants with unlinked loci for the gene of interest and the selectable marker, enabling the removal of the selectable marker in subsequent generations, should this be regarded as desirable. However, a disadvantage of the use of co-transformation is the less than 100% frequency with which separate DNA species are integrated into the genome (Schocher et al., 1986).

[0331] Patent Applications EP 0 292 435, EP 0 392 225, and WO 93/07278 describe techniques for the preparation of callus and protoplasts from an elite inbred line of maize, transformation of protoplasts using PEG or electroporation, and the regeneration of maize plants from transformed protoplasts. Gordon-Kamm et al., 1990 and Fromm et al., 1990 have published techniques for transformation of A188-derived maize line using particle bombardment. Furthermore, WO 93/07278 and Koziel et al., 1993 describe techniques for the transformation of elite inbred lines of maize by particle bombardment. This technique utilizes immature maize embryos of 1.5-2.5 mm length excised from a maize ear 14-15 days after pollination and a PDS-1000He Biolistic particle delivery device (DuPont Biotechnology, Wilmington, Del., United States of America) for bombardment.

[0332] Transformation of rice can also be undertaken by direct gene transfer techniques utilizing protoplasts or particle bombardment. Protoplast-mediated transformation has been disclosed for Japonica-types and Indica-types (Zhang et al., 1988; Shimamoto et al., 1989; Datta et al., 1990) of rice. Both types are also routinely transformable using particle bombardment (Christou et al., 1991). Furthermore, WO 93/21335 describes techniques for the transformation of rice via electroporation. Casas et al., 1993 discloses the production of transgenic sorghum plants by microprojectile bombardment.

[0333] Patent Application EP 0 332 581 describes techniques for the generation, transformation, and regeneration of Pooideae protoplasts. These techniques allow the transformation of Dactylis and wheat. Furthermore, wheat transformation has been disclosed in Vasil et al., 1992 using particle bombardment into cells of type C long-term regenerable callus, and also by Vasil et al., 1993 and Weeks et al., 1993 using particle bombardment of immature embryos and immature embryo-derived callus.

[0334] A representative technique for wheat transformation, however, involves the transformation of wheat by particle bombardment of immature embryos and includes either a high sucrose or a high maltose step prior to gene delivery. Prior to bombardment, embryos (0.75-1 mm in length) are plated onto MS medium with 3% sucrose (Murashige & Skoog, 1962) and 3 mg/l 2,4-dichlorophenoxyacetic acid (2,4-D) for induction of somatic embryos, which is allowed to proceed in the dark. On the chosen day of bombardment, embryos are removed from the induction medium and placed onto the osmoticum (i.e. induction medium with sucrose or maltose added at the desired concentration, typically 15%). The embryos are allowed to plasmolyze for 2-3 hours and are then bombarded. Twenty embryos per target plate are typical, although not critical. An appropriate gene-carrying plasmid (such as pCIB3064 or pSG35) is precipitated onto micrometer size gold particles using standard procedures. Each plate of embryos is shot with the DuPont BIOLISTICS® helium device using a burst pressure of about 1000 pounds per square inch (psi) using a standard 80 mesh screen. After bombardment, the embryos are placed back into the dark to recover for about 24 hours (still on osmoticum). After 24 hours, the embryos are removed from the osmoticum and placed back onto induction medium where they stay for about a month before regeneration. Approximately one month later the embryo explants with developing embryogenic callus are transferred to regeneration medium (MS+1 mg/liter NM, 5 mg/liter GA), further containing the appropriate selection agent (10 mg/l BASTA® in the case of pCIB3064 and 2 mg/l methotrexate in the case of pSOG35). After approximately one month, developed shoots are transferred to larger sterile containers known as “GA7s” which contain half-strength MS, 2% sucrose, and the same concentration of selection agent.

[0335] Transformation of monocotyledons using Agrobacterium has also been disclosed. See WO 94/00977 and U.S. Pat. No. 5,591,616, both of which are incorporated herein by reference. See also Negrotto et al., 2000, incorporated herein by reference. Zhao et al., 2000 specifically discloses transformation of sorghum with Agrobacterium. See also U.S. Pat. No. 6,369,298.

[0336] Rice (Oryza sativa) can be used for generating transgenic plants. Various rice cultivars can be used (Hiei et al., 1994; Dong et al., 1996; Hiei et al., 1997). Also, the various media constituents disclosed below can be either varied in quantity or substituted. Embryogenic responses are initiated and/or cultures are established from mature embryos by culturing on MS-CIM medium (MS basal salts, 4.3 g/liter; B5 vitamins (200×), 5 ml/liter; Sucrose, 30 g/liter; proline, 500 mg/liter; glutamine, 500 mg/liter; casein hydrolysate, 300 mg/liter; 2,4-D (1 mg/ml), 2 ml/liter; pH adjusted to 5.8 with 1 N KOH; Phytagel, 3 g/liter). Either mature embryos at the initial stages of culture response or established culture lines are inoculated and co-cultivated with the Agrobacterium tumefaciens strain LBA4404 (Agrobacterium) containing the desired vector construction. Agrobacterium is cultured from glycerol stocks on solid YPC medium (plus 100 mg/L spectinomycin and any other appropriate antibiotic) for about 2 days at 28° C. Agrobacterium is re-suspended in liquid MS-CIM medium. The Agrobacterium culture is diluted to an OD₆₀₀ of 0.2-0.3 and acetosyringone is added to a final concentration of 200 μM. Acetosyringone is added before mixing the solution with the rice cultures to induce Agrobacterium for DNA transfer to the plant cells. For inoculation, the plant cultures are immersed in the bacterial suspension. The liquid bacterial suspension is removed and the inoculated cultures are placed on co-cultivation medium and incubated at 22° C. for two days. The cultures are then transferred to MS-CIM medium with ticarcillin (400 mg/liter) to inhibit the growth of Agrobacterium. For constructs utilizing the PMI selectable marker gene (Reed et al., 2001), cultures are transferred to selection medium containing mannose as a carbohydrate source (MS with 2% mannose, 300 mg/liter ticarcillin) after 7 days, and cultured for 3-4 weeks in the dark. Resistant colonies are then transferred to regeneration induction medium (MS with no 2,4-D, 0.5 mg/liter IAA, 1 mg/liter zeatin, 200 mg/liter TIMENTIN®, 2% mannose, and 3% sorbitol) and grown in the dark for 14 days. Proliferating colonies are then transferred to another round of regeneration induction media and moved to the light growth room. Regenerated shoots are transferred to GA7 containers with GA7-1 medium (MS with no hormones and 2% sorbitol) for 2 weeks and then moved to the greenhouse when they are large enough and have adequate roots. Plants are transplanted to soil in the greenhouse (T₀ generation) grown to maturity and the T₁ seed is harvested. E. Growth and Screening of Transformed Cells

[0337] Transgenic plant cells are then placed in an appropriate selective medium for selection of transgenic cells, which are then grown to callus. Shoots are grown from callus and plantlets generated from the shoot by growing in rooting medium. The various constructs normally are joined to a marker for selection in plant cells. Conveniently, the marker can be resistance to a biocide (for example, an antibiotic including, but not limited to kanamycin, G418, bleomycin, hygromycin, chloramphenicol, herbicide, or the like). The particular marker used is designed to allow for the selection of transformed cells (as compared to cells lacking the DNA that has been introduced). Components of DNA constructs including transcription cassettes of the presently disclosed subject matter are prepared from sequences that are native (endogenous) or foreign (exogenous) to the host. As used herein, the terms “foreign” and “exogenous” refer to sequences that are not found in the wild-type host into which the construct is introduced, or alternatively, have been isolated from the host species and incorporated into an expression vector. Heterologous constructs contain in one embodiment at least one region that is not native to the gene from which the transcription initiation region is derived.

[0338] To confirm the presence of the transgenes in transformed cells and plants, a variety of assays can be performed. Such assays include, for example, “molecular biological” assays well known to those of skill in the art, such as Southern and Northern blotting, in situ hybridization and nucleic acid-based amplification methods such as PCR or RT-PCR; “biochemical” assays, such as detecting the presence of a protein product, e.g., by immunological means (enzyme-linked immunosorbent assays (ELISAs) and Western blots) or by enzymatic function; plant part assays, such as seed assays; and also by analyzing the phenotype of the whole regenerated plant, e.g., for disease or pest resistance.

[0339] DNA can be isolated from cell lines or any plant parts to determine the presence of the preselected nucleic acid segment through the use of techniques well known to those skilled in the art. Note that intact sequences will not always be present, presumably due to rearrangement or deletion of sequences in the cell.

[0340] The presence of nucleic acid elements introduced through the methods of this presently disclosed subject matter can be determined by the polymerase chain reaction (PCR). Using this technique, discreet fragments of nucleic acid are amplified and detected by gel electrophoresis. This type of analysis permits one to determine whether a preselected nucleic acid segment is present in a stable transformant. It is contemplated that using PCR techniques it would be possible to clone fragments of the host genomic DNA adjacent to an introduced preselected DNA segment.

[0341] Positive proof of DNA integration into the host genome and the independent identities of transformants can be determined using the technique of Southern hybridization. Using this technique, specific DNA sequences that are introduced into the host genome and flanking host DNA sequences can be identified. Hence, the Southern hybridization pattern of a given transformant serves as an identifying characteristic of that transformant. In addition, it is possible through Southern hybridization to demonstrate the presence of introduced preselected DNA segments in high molecular weight DNA: e.g., to confirm that the introduced preselected DNA segment has been integrated into the host cell genome. Southern hybridization provides certain information that can also be obtained using PCR, e.g., the presence of a preselected DNA segment, but can also demonstrate integration of an exogenous nucleic acid molecule into the genome and can characterize each individual transformant.

[0342] It is contemplated that using the techniques of dot or slot blot hybridization, which are modifications of Southern hybridization techniques, the same information that is derived from PCR could be obtained (e.g., the presence of a preselected DNA segment).

[0343] Both PCR and Southern hybridization techniques can be used to demonstrate transmission of a preselected DNA segment to progeny. In most instances, the characteristic Southern hybridization pattern for a given transformant will segregate in progeny as one or more Mendelian genes (Spencer et al., 1992; Laursen et al., 1994), indicating stable inheritance of the gene. The non-chimeric nature of the callus and the parental transformants (R₀) can be suggested by germline transmission and the identical Southern blot hybridization patterns and intensities of the transforming DNA in callus, R₀ plants, and R₁ progeny that segregated for the transformed gene.

[0344] Whereas certain DNA analysis techniques can be conducted using DNA isolated from any part of a plant, specific RNAs might only be expressed in particular cells or tissue types and hence it can be necessary to prepare RNA for analysis from these tissues. PCR techniques can also be used for detection and quantitation of RNA produced from introduced preselected DNA molecules. In this application of PCR, it is first necessary to reverse transcribe RNA into complementary DNA (cDNA) using an enzyme such as a reverse transcriptase, and then through the use of conventional PCR techniques, to amplify the resulting cDNA.

[0345] In some instances, PCR techniques might not demonstrate the integrity of the RNA product. Further information about the nature of the RNA product can be obtained by Northern blotting. This technique demonstrates the presence of an RNA species and additionally gives information about the integrity of that RNA. The presence or absence of an RNA species can also be determined using dot or slot blot Northern hybridizations using techniques known in the art. These techniques are modifications of Northern blotting and typically demonstrate only the presence or absence of an RNA species.

[0346] Thus, Southern blotting and PCR can be used to detect the presence of a DNA molecule of interest. Expression can be evaluated by specifically identifying the protein products of the introduced preselected DNA segments or evaluating the phenotypic changes brought about by their expression.

[0347] Assays for the production and identification of specific proteins can make use of physical-chemical, structural, functional, or other properties of the proteins. Unique physical-chemical or structural properties allow the proteins to be separated and identified by electrophoretic procedures, such as native or denaturing gel electrophoresis or isoelectric focusing, or by chromatographic techniques such as ion exchange or gel exclusion chromatography. The unique structures of individual proteins offer opportunities for use of specific antibodies to detect the presence of individual proteins using art-recognized techniques such as an ELISA assay. Combinations of approaches can be employed to gain additional information, such as Western blotting, in which antibodies are used to locate individual gene products that have been separated by electrophoretic techniques and transferred to a solid support. Additional techniques can be employed to confirm the identity of the product of interest, such as evaluation by amino acid sequencing following purification. Although these are among the most commonly employed, other procedures known to the skilled artisan can also be used.

[0348] Assay procedures can also be used to identify the expression of proteins by their functions, especially the ability of enzymes to catalyze specific chemical reactions involving specific substrates and products. These reactions can be followed by providing and quantifying the loss of substrates or the generation of products of the reactions by physical or chemical procedures. Examples are as varied as the enzyme to be analyzed, and are known in the art for many different enzymes.

[0349] The expression of a gene product can also be determined by evaluating the phenotypic results of its expression. These assays also can take many forms including, but not limited to analyzing changes in the chemical composition, morphology, or physiological properties of the plant. Morphological changes can include greater stature or thicker stalks. Changes in the response of plants or plant parts to imposed treatments are typically evaluated under carefully controlled conditions termed bioassays.

[0350] As such, protein expression levels can be measured by any standard method. For example, antibodies (monoclonal or polyclonal) can be generated by standard methods that specifically bind to a stress-related protein of the presently disclosed subject matter (see methods for making antibodies in, e.g., Ausubel et al., 1988, including updates up to 2002; Harlow & Lane, 1988). Using such a stress-related protein-specific antibody, protein levels can be determined by any immunological method including, without limitation, Western blotting, immunoprecipitation, and ELISA.

[0351] Another non-limiting method for measuring protein level is by measuring mRNA levels. For example, total mRNA can be isolated from a cell introduced with a nucleic acid molecule of the presently disclosed subject matter (or with an antisense of such a nucleic acid molecule) and from an untreated cell. Northern blotting analysis using the nucleic acid molecule that was introduced to the treated cell as a probe can indicate if the treated cell expresses the nucleic acid molecule at a different level (at both the mRNA and polypeptide levels) as compared to the untreated cell.

[0352] Changes in stress response (either in unchallenged cells and plants, or in cells and plants challenged with, for example, exposure to salt or pathogen-infection) can be readily determined by any standard method, such as counting the cells by any standard method. For example, cells can be manually counted using a hemacytometer or microscope. Callus growth and plant growth can be measured by weight and/or height. Individual cell growth can be determined by any standard stress response assay (e.g., ³H incorporation).

[0353] The presently disclosed subject matter further includes the manipulation of stress response by modulation of the expression of more than one of the stress-related proteins described herein. For example, an increase in the level of expression of a first stress-related protein coupled with a decrease in the level of expression of a second stress-related protein can result in a greater change in the stress response of a cell (or plant including such a cell) than either the increase in the level of expression of a first stress-related protein of the decrease in the level of expression of a second the stress-related protein alone. The presently disclosed subject matter has provided numerous stress-related proteins and their interrelations with one another. Manipulation of expression of one or more of the stress-related proteins of the presently disclosed subject matter enables the development of genetically engineered plants (i.e., transgenic plants) that have superior stress response under stress (e.g., biotic or abiotic stress).

VI. Plants, Breeding, and Seed Production

A. Plants

[0354] A host cell is any type of cell including, without limitation, a bacterial cell, a yeast cell, a plant cell, an insect cell, and a mammalian cell. Numerous such cells are commercially available, for example, from the American Type Culture Collection, Manassas, Va., United States of America.

[0355] In certain embodiments, the cell is a plant cell, which can be regenerated to form a transgenic plant. Thus, the presently disclosed subject matter provides a transformed (transgenic) plant cell, in planta or ex planta, including a transformed plastid or other organelle (e.g., nucleus, mitochondria or chloroplast). As used herein, a “transgenic plant” is a plant having one or more plant cells that contain an exogenous nucleic acid molecule (e.g., a nucleic acid molecule encoding a stress-related polypeptide of the presently disclosed subject matter). Thus, a transgenic plant can comprise a nucleic acid molecule comprising a foreign nucleic acid sequence (i.e. a nucleic acid sequence derived from a different plant species). Alternatively or in addition, a transgenic plant can comprise a nucleic acid molecule comprising a nucleic acid sequence from the same plant species, wherein the nucleic acid sequence has been isolated from that plant species. In the latter example, the nucleic acid sequence can be the same or different from the wild-type sequence, and can optionally include regulatory sequences that are the same or different from those that are found in the naturally occurring plant.

[0356] The presently disclosed subject matter can be used for transforming cells of any plant species, including, but not limited to from corn (Zea mays), Brassica sp. (e.g., B. napus, B. rapa, B. juncea), particularly those Brassica species useful as sources of seed oil, alfalfa (Medicago sativa), rice (Oryza sativa), rye (Secale cereale), sorghum (Sorghum bicolor, Sorghum vulgare), millet (e.g., pearl millet (Pennisetum glaucum)), proso millet (Panicum miliaceum), foxtail millet (Setaria italica), finger millet (Eleusine coracana)), sunflower (Helianthus annuus), safflower (Carthamus tinctorius), wheat (Triticum aestivum), soybean (Glycine max), tobacco (Nicotiana tabacum), potato (Solanum tuberosum), peanut (Arachis hypogaea), cotton (Gossypium barbadense, Gossypium hirsutum), sweet potato (Ipomoea batatus), cassaya (Manihot esculenta), coffee (Cofea spp.), coconut (Cocos nucifera), pineapple (Ananas comosus), citrus trees (Citrus spp.), cocoa (Theobroma cacao), tea (Camellia sinensis), banana (Musa spp.), avocado (Persea ultilane), fig (Ficus casica), guava (Psidium guajava), mango (Mangifera indica), olive (Olea europaea), papaya (Carica papaya), cashew (Anacardium occidentale), macadamia (Macadamia integrifolia), almond (Prunus amygdalus), sugar beets (Beta vulgaris), sugarcane (Saccharum spp.), oats, duckweed (Lemna), barley, vegetables, ornamentals, and conifers.

[0357] Duckweed (Lemna, see PCT International Publication No. WO 00/07210) includes members of the family Lemnaceae. There are known four genera and 34 species of duckweed as follows: genus Lemna (L. aequinoctialis, L. disperma, L. ecuadoriensis, L. gibba, L. japonica, L. minor, L. miniscula, L. obscura, L. perpusilla, L. tenera, L. trisulca, L. turionifera, L. valdiviana); genus Spirodela (S. intermedia, S. polyrrhiza, S. punctata); genus Woffia (Wa. Angusta, Wa. Arrhiza, Wa. Australina, Wa. Borealis, Wa. Brasiliensis, Wa. Columbiana, Wa. Elongata, Wa. Globosa, Wa. Microscopica, Wa. Neglecta) and genus Wofiella (W1. ultila, W1. ultilanen, W1. gladiata, W1. ultila, W1. lingulata, W1. repunda, W1. rotunda, and W1. neotropica). Any other genera or species of Lemnaceae, if they exist, are also aspects of the presently disclosed subject matter. In one embodiment, Lemna gibba is employed in the presently disclosed subject matter, and in other embodiments, Lemna minor and Lemna miniscula are employed. Lemna species can be classified using the taxonomic scheme described by Landolt, 1986.

[0358] Vegetables within the scope of the presently disclosed subject matter include tomatoes (Lycopersicon esculentum), lettuce (e.g., Lactuca sativa), green beans (Phaseolus vulgaris), lima beans (Phaseolus limensis), peas (Lathyrus spp.), and members of the genus Cucumis such as cucumber (C. sativus), cantaloupe (C. cantalupensis), and musk melon (C. melo). Ornamentals include azalea (Rhododendron spp.), hydrangea (Macrophylla hydrangea), hibiscus (Hibiscus rosasanensis), roses (Rosa spp.), tulips (Tulipa spp.), daffodils (Narcissus spp.), petunias (Petunia hybrida), carnations (Dianthus caryophyllus), poinsettias (Euphorbia pulcherrima), and chrysanthemums. Conifers that can be employed in practicing the presently disclosed subject matter include, for example, pines such as loblolly pine (Pinus taeda), slash pine (Pinus elliotil), ponderosa pine (Pinus ponderosa), lodgepole pine (Pinus contorta), and Monterey pine (Pinus radiata), Douglas-fir (Pseudotsuga menziesil); Western hemlock (Tsuga ultilane); Sitka spruce (Picea glauca); redwood (Sequoia sempervirens); true firs such as silver fir (Abies amabilis) and balsam fir (Abies balsamea); and cedars such as Western red cedar (Thuja plicata) and Alaska yellow-cedar (Chamaecyparis nootkatensis).

[0359] Leguminous plants that can be employed in the presently disclosed subject matter include beans and peas. Representative beans include guar, locust bean, fenugreek, soybean, garden beans, cowpea, mungbean, lima bean, fava bean, lentils, chickpea, etc. Legumes include, but are not limited to Arachis (e.g., peanuts), Vicia (e.g., crown vetch, hairy vetch, adzuki bean, mung bean, and chickpea), Lupinus (e.g., lupine, trifolium), Phaseolus (e.g., common bean and lima bean), Pisum (e.g., field bean), Melilotus (e.g., clover), Medicago (e.g., alfalfa), Lotus (e.g., trefoil), lens (e.g., lentil), and false indigo. Non-limiting forage and turf grass for use in the methods of the presently disclosed subject matter include alfalfa, orchard grass, tall fescue, perennial ryegrass, creeping bent grass, and redtop.

[0360] Other plants within the scope of the presently disclosed subject matter include Acacia, aneth, artichoke, arugula, blackberry, canola, cilantro, clementines, escarole, eucalyptus, fennel, grapefruit, honey dew, jicama, kiwifruit, lemon, lime, mushroom, nut, okra, orange, parsley, persimmon, plantain, pomegranate, poplar, radiata pine, radicchio, Southern pine, sweetgum, tangerine, triticale, vine, yams, apple, pear, quince, cherry, apricot, melon, hemp, buckwheat, grape, raspberry, chenopodium, blueberry, nectarine, peach, plum, strawberry, watermelon, eggplant, pepper, cauliflower, Brassica, e.g., broccoli, cabbage, ultilan sprouts, onion, carrot, leek, beet, broad bean, celery, radish, pumpkin, endive, gourd, garlic, snapbean, spinach, squash, turnip, ultilane, and zucchini.

[0361] Ornamental plants within the scope of the presently disclosed subject matter include impatiens, Begonia, Pelargonium, Viola, Cyclamen, Verbena, Vinca, Tagetes, Primula, Saint Paulia, Agertum, Amaranthus, Antihirrhinum, Aquilegia, Cineraria, Clover, Cosmo, Cowpea, Dahlia, Datura, Delphinium, Gerbera, Gladiolus, Gloxinia, Hippeastrum, Mesembryanthemum, Salpiglossos, and Zinnia.

[0362] In certain embodiments, transgenic plants of the presently disclosed subject matter are crop plants and in particular cereals. Such crop plants and cereals include, but are not limited to corn, alfalfa, sunflower, rice, Brassica, canola, soybean, barley, soybean, sugarbeet, cotton, safflower, peanut, sorghum, wheat, millet, and tobacco.

[0363] The presently disclosed subject matter also provides plants comprising the disclosed compositions. In one embodiment, the plant is characterized by a modification of a phenotype or measurable characteristic of the plant, the modification being attributable to the expression cassette. In one embodiment, the modification involves, for example, nutritional enhancement, increased nutrient uptake efficiency, enhanced production of endogenous compounds, or production of heterologous compounds. In another embodiment, the modification includes having increased or decreased resistance to an herbicide, an abiotic stress, or a pathogen. In another embodiment, the modification includes having enhanced or diminished requirement for light, water, nitrogen, or trace elements. In another embodiment, the modification includes being enriched for an essential amino acid as a proportion of a polypeptide fraction of the plant. In another embodiment, the polypeptide fraction can be, for example, total seed polypeptide, soluble polypeptide, insoluble polypeptide, water-extractable polypeptide, and lipid-associated polypeptide. In another embodiment, the modification includes overexpression, underexpression, antisense modulation, sense suppression, inducible expression, inducible repression, or inducible modulation of a gene.

B. Breeding

[0364] The plants obtained via transformation with a nucleic acid sequence of the presently disclosed subject matter can be any of a wide variety of plant species, including monocots and dicots; however, the plants used in the method for the presently disclosed subject matter are selected in one embodiment from the list of agronomically important target crops set forth hereinabove. The expression of a gene of the presently disclosed subject matter in combination with other characteristics important for production and quality can be incorporated into plant lines through breeding. Breeding approaches and techniques are known in the art. See e.g., Welsh, 1981; Wood, 1983; Mayo, 1987; Singh, 1986; Wricke & Weber, 1986.

[0365] The genetic properties engineered into the transgenic seeds and plants disclosed above are passed on by sexual reproduction or vegetative growth and can thus be maintained and propagated in progeny plants. Generally, the maintenance and propagation make use of known agricultural methods developed to fit specific purposes such as tilling, sowing, or harvesting. Specialized processes such as hydroponics or greenhouse technologies can also be applied. As the growing crop is vulnerable to attack and damage caused by insects or infections as well as to competition by weed plants, measures are undertaken to control weeds, plant diseases, insects, nematodes, and other adverse conditions to improve yield. These include mechanical measures such as tillage of the soil or removal of weeds and infected plants, as well as the application of agrochemicals such as herbicides, fungicides, gametocides, nematicides, growth regulants, ripening agents, and insecticides.

[0366] Use of the advantageous genetic properties of the transgenic plants and seeds according to the presently disclosed subject matter can further be made in plant breeding, which aims at the development of plants with improved properties such as tolerance of pests, herbicides, or biotic or abiotic stress, improved nutritional value, increased yield or proliferation, or improved structure causing less loss from lodging or shattering. The various breeding steps are characterized by well-defined human intervention such as selecting the lines to be crossed, directing pollination of the parental lines, or selecting appropriate progeny plants.

[0367] Depending on the desired properties, different breeding measures are taken. The relevant techniques are well known in the art and include, but are not limited to, hybridization, inbreeding, backcross breeding, multiline breeding, variety blend, interspecific hybridization, aneuploid techniques, etc. Hybridization techniques can also include the sterilization of plants to yield male or female sterile plants by mechanical, chemical, or biochemical means. Cross-pollination of a male sterile plant with pollen of a different line assures that the genome of the male sterile but female fertile plant will uniformly obtain properties of both parental lines. Thus, the transgenic seeds and plants according to the presently disclosed subject matter can be used for the breeding of improved plant lines that, for example, increase the effectiveness of conventional methods such as herbicide or pesticide treatment or allow one to dispense with said methods due to their modified genetic properties. Alternatively new crops with improved stress tolerance can be obtained, which, due to their optimized genetic “equipment”, yield harvested product of better quality than products that were not able to tolerate comparable adverse developmental conditions (for example, drought).

[0368] Additionally, The presently disclosed subject matter also provides a transgenic plant, a seed from such a plant, and progeny plants from such a plant including hybrids and inbreds. In representative embodiments, transgenic plants are transgenic maize, soybean, barley, alfalfa, sunflower, canola, soybean, cotton, peanut, sorghum, tobacco, sugarbeet, rice, wheat, rye, turfgrass, millet, sugarcane, tomato, or potato.

[0369] A transformed (transgenic) plant of the presently disclosed subject matter includes a plant, the genome of which is augmented by an exogenous nucleic acid molecule, or in which a gene has been disrupted, e.g., to result in a loss, a decrease, or an alteration in the function of the product encoded by the gene, which plant can also have increased yields and/or produce a better-quality product than the corresponding wild-type plant. The nucleic acid molecules of the presently disclosed subject matter are thus useful for targeted gene disruption, as well as for use as markers and probes.

[0370] The presently disclosed subject matter also provides a method of plant breeding, e.g., to prepare a crossed fertile transgenic plant. The method comprises crossing a fertile transgenic plant comprising a particular nucleic acid molecule of the presently disclosed subject matter with itself or with a second plant, e.g., one lacking the particular nucleic acid molecule, to prepare the seed of a crossed fertile transgenic plant comprising the particular nucleic acid molecule. The seed is then planted to obtain a crossed fertile transgenic plant. The plant can be a monocot or a dicot. In a particular embodiment, the plant is a cereal plant.

[0371] The crossed fertile transgenic plant can have the particular nucleic acid molecule inherited through a female parent or through a male parent. The second plant can be an inbred plant. The crossed fertile transgenic can be a hybrid. Also included within the presently disclosed subject matter are seeds of any of these crossed fertile transgenic plants.

C. Seed Production

[0372] Some embodiments of the presently disclosed subject matter also provide seed and isolated product from plants that comprise an expression cassette comprising a promoter sequence operatively linked to an isolated nucleic acid as disclosed herein. In some embodiments, the isolated nucleic acid molecule is selected from the group consisting of:
[0373] a. a nucleic acid molecule encoding a polypeptide comprising an amino acid sequence of one of even numbered SEQ ID NOs: 2-112;
[0374] b. a nucleic acid molecule comprising a nucleic acid sequence of one of odd numbered SEQ ID NOs: 1-111;
[0375] c. a nucleic acid molecule that has a nucleic acid sequence at least 90% identical to the nucleic acid sequence of the nucleic acid molecule of (a) or (b);
[0376] d. a nucleic acid molecule that hybridizes to (a) or (b) under conditions of hybridization selected from the group consisting of:
   [0377] i. 7% sodium dodecyl sulfate (SDS), 0.5 M NaPO₄, 1 mM ethylenediamine tetraacetic acid (EDTA) at 50° C. with a final wash in 2× standard saline citrate (SSC), 0.1% SDS at 50° C.;
   [0378] ii. 7% SDS, 0.5 M NaPO₄, 1 mM EDTA at 50° C. with a final wash in 1×SSC, 0.1% SDS at 50° C.;
   [0379] iii. 7% SDS, 0.5 M NaPO₄, 1 mM EDTA at 50° C. with a final wash in 0.5×SSC, 0.1% SDS at 50° C.;
   [0380] iv. 7% sodium dodecyl sulfate (SDS), 0.5 M NaPO₄, 1 mM EDTA at 50° C. with a final wash in 0.1×SSC, 0.1% SDS at 50° C.; and
   [0381] v. 7% sodium dodecyl sulfate (SDS), 0.5 M NaPO₄, 1 mM EDTA at 50° C. with a final wash in 0.1×SSC, 0.1% SDS at 65° C.;
[0382] e. a nucleic acid molecule comprising a nucleic acid sequence fully complementary to (a); and
[0383] f. a nucleic acid molecule comprising a nucleic acid sequence that is the full reverse complement of (a).

[0384] In one embodiment the isolated product comprises an enzyme, a nutritional polypeptide, a structural polypeptide, an amino acid, a lipid, a fatty acid, a polysaccharide, a sugar, an alcohol, an alkaloid, a carotenoid, a propanoid, a steroid, a pigment, a vitamin, or a plant hormone.

[0385] Embodiments of the presently disclosed subject matter also relate to isolated products produced by expression of an isolated nucleic acid containing a nucleotide sequence selected from the group consisting of:
[0386] (a) a nucleotide sequence that hybridizes under conditions of hybridization of 45° C. in 1 M NaCl, followed by a final washing step at 50° C. in 0.1 M NaCl to a nucleotide sequence listed in odd numbered sequences of SEQ ID NOs: 1-185, or a fragment, domain, or feature thereof;
[0387] (b) a nucleotide sequence encoding a polypeptide that is an ortholog of a polypeptide listed in even numbered sequences of SEQ ID NOs: 2-186, or a fragment, domain, or feature thereof;
[0388] (c) a nucleotide sequence complementary (for example, fully complementary) to (a) or (b); and
[0389] (d) a nucleotide sequence that is the reverse complement (for example, its full reverse complement) of (a) or (b) according to the present disclosure.

[0390] In one embodiment, the product is produced in a plant. In another embodiment, the product is produced in cell culture. In another embodiment, the product is produced in a cell-free system. In one embodiment, the product comprises an enzyme, a nutritional polypeptide, a structural polypeptide, an amino acid, a lipid, a fatty acid, a polysaccharide, a sugar, an alcohol, an alkaloid, a carotenoid, a propanoid, a steroid, a pigment, a vitamin, or a plant hormone. In another embodiment, the product is polypeptide comprising an amino acid sequence listed in even numbered sequences of SEQ ID NOs: 2-112, or ortholog thereof. In one embodiment, the polypeptide comprises an enzyme.

[0391] In seed production, germination quality and uniformity of seeds are essential product characteristics. As it is difficult to keep a crop free from other crop and weed seeds, to control seedborne diseases, and to produce seed with good germination, fairly extensive and well-defined seed production practices have been developed by seed producers who are experienced in the art of growing, conditioning, and marketing of pure seed. Thus, it is common practice for the farmer to buy certified seed meeting specific quality standards instead of using seed harvested from his own crop. Propagation material to be used as seeds is customarily treated with a protectant coating comprising herbicides, insecticides, fungicides, bactericides, nematicides, molluscicides, or mixtures thereof. Customarily used protectant coatings comprise compounds such as captan, carboxin, thiram (tetramethylthiuram disulfide; TMTD®); available from R. T. Vanderbilt Company, Inc., Norwalk, Conn., United States of America), methalaxyl (APRON XL®; available from Syngenta Corp., Wilmington, Del., United States of America), and pirimiphos-methyl (ACTELLIC®; available from Agriliance, LLC, St. Paul, Minn., United States of America). If desired, these compounds are formulated together with further carriers, surfactants, and/or application-promoting adjuvants customarily employed in the art of formulation to provide protection against damage caused by bacterial, fungal, or animal pests. The protectant coatings can be applied by impregnating propagation material with a liquid formulation or by coating with a combined wet or dry formulation. Other methods of application are also possible such as treatment directed at the buds or the fruit.

[0392] The presently disclosed subject matter will be further described by reference to the following detailed examples. These examples are provided for purposes of illustration only, and are not intended to be limiting unless otherwise specified.

### EXAMPLES

[0393] The following Examples have been included to illustrate modes of the presently disclosed subject matter. In light of the present disclosure and the general level of skill in the art, those of skill will appreciate that the following Examples are intended to be exemplary only and that numerous changes, modifications, and alterations can be employed without departing from the scope of the presently disclosed subject matter.

### Example I

[0394] The example describes the identification and characterization of rice proteins that interact at the thylakoid of chloroplasts and other cellular membranes. Specifically, described in this example are newly characterized rice proteins interacting with the rice 14-3-3 protein homolog GF14-c (OsGF14-c) and with Defender Against Apoptotic Death 1 (OsDAD1).

[0395] The 14-3-3 proteins (reviewed in Muslin & Xing, 2000) interact with a variety of regulators of cellular signaling, cell cycle, and apoptosis by binding to their partner proteins. The high potential for specific protein-protein interactions makes these proteins suitable for two-hybrid assays. The 14-3-3 proteins are known to participate in protein complexes within the nucleus and are commonly found in the cytoplasm. Studies using yeast two-hybrid assays have also localized GF14 isoforms to the chloroplast stroma and the stromal side of thylakoid membranes (Sehnke et al., 2000). However, the subcellular localization of GF14-c had not been directly assessed to date. Investigation of the protein interactions involving OsGF14-c can lead to the identification of its location within the cell.

[0396] OsDAD1 is encoded by the rice homolog of the highly conserved DAD gene, a suppressor of endogenous programmed cell death, or apoptosis, in animals and plants (Apte et al., 1995; Gallois et al., 1997). In support of this role for DAD, expression of a DAD plant homolog has been shown to be down-regulated during flower petal senescence (an example of programmed cell death) and by the plant hormone ethylene, which is associated with a variety of stress responses and developmental processes (Orzaez & Granell, 1997). While these studies have been conducted with DAD homologs from Arabidopsis and pea, the rice DAD1 is not described in the literature. The interaction studies provided below were aimed at further characterizing this protein.

[0397] An automated, high-throughput yeast two-hybrid assay technology (as described above) was used to search for rice protein that interacted with the bait proteins OsGF14-c and OsDAD1. The sequences encoding the protein fragments used in the search were then compared by BLAST analysis against databases to determine the sequences of the full-length genes. The proteins found appear to be localized to the thylakoid of chloroplasts, vacuolar membrane and plasma membrane. The results indicate that OsGF14-c is a membrane component in rice. The subset of proteins interacting with OsGF14-c at the thylakoid form a novel chloroplast protein complex involved in the photosynthetic processes. This interaction study also identifies the rice OsDAD1 as a membrane protein, in agreement with previously characterized DAD homologs from other species. Elucidation of the role of proteins interacting at the thylakoid and other cellular membranes in rice chloroplasts can allow the development of herbicides specifically targeted to disrupting the structure and function of the thylakoid or endomembrane system.

[0398] This example provides newly characterized rice proteins interacting with the rice 14-3-3 protein homolog GF14-c (OsGF14-c) and with Defender Against Apoptotic Death 1 (OsDAD1). An automated, high-throughput yeast two-hybrid assay technology (provided by Myriad Genetics Inc., Salt Lake City, Utah) was used to search for protein interactions with the bait proteins OsGF14-c and OsDAD1. The 14-3-3 proteins (reviewed in Muslin & Xing, 2000) interact with a variety of regulators of cellular signaling, cell cycle, and apoptosis by binding to their partner proteins. The high potential for specific protein-protein interactions makes these proteins suitable for two-hybrid assays. The 14-3-3 proteins are known to participate in protein complexes within the nucleus and are commonly found in the cytoplasm. Studies using yeast two-hybrid assays have also localized GF14 isoforms to the chloroplast stroma and the stromal side of thylakoid membranes (Sehnke et al., 2000). However, the subcellular localization of GF14-c had not been directly assessed to date. Investigation of the protein interactions involving OsGF14-c can lead to the identification of its location within the cell.

[0399] OsDAD1 is encoded by the rice homolog of the highly conserved DAD gene, a suppressor of endogenous programmed cell death, or apoptosis, in animals and plants (Apte et al., 1995; Gallois et al., 1997). In support of this role for DAD, expression of a DAD plant homolog has been shown to be down-regulated during flower petal senescence (an example of programmed cell death) and by the plant hormone ethylene, which is associated with a variety of stress responses and developmental processes (Orzaez & Granell, 1997). While these studies have been conducted with DAD homologs from Arabidopsis and pea, the rice DAD1 is not described. The interaction studies provided in this example are aimed at characterizing this protein.

Results

[0400] GF14-c was found to interact with EPSP synthase, an enzyme in the shikimate pathway (OsBAB61062); two enzymes with roles in the Calvin cycle reactions in chloroplasts, a rice chloroplastic aldolase (OsBAA02730) and a the chloroplast enzyme RUBISCO (OsRBCL); the RUBISCO activase precursor (OsRCAA1); and two rice photosystem proteins, putative 33 kDa oxygen-evolving protein of photosystem II (OsPN23059) and photosystem II 10 kDa polypeptide (OsAAB46718). Eight additional interactors for GF14-c are novel rice proteins: a photosystem protein (OsPN23061) similar to barley (Hordeum vulgare) photosystem I reaction center subunit II, chloroplast precursor; a protein (OsPN22858) similar to Arabidopsis thaliana GTP cyclohydrolase II, an enzyme involved in the biosynthesis of vitamin B riboflavin (a cofactor in the shikimate pathway); a protein (OsPN22874) similar to A. thaliana phosphatidylinositol-4-phosphate 5 kinase (PI4P5K), an enzyme involved in signaling events associated with water-stress response in plants; two H⁺-ATPases, similar to A. thaliana vacuolar ATP synthase subunit C (OsPN22866) and to barley plasma membrane H⁺-ATPase (OsPN23022); a putative dynamin homolog (OsPN30846) that is likely localized to the chloroplast, as are other plant dynamin family members; and two proteins of unknown function (OsPN29982 and OsPN30974).

[0401] OsDAD1 was found to interact with three membrane proteins: rice beta-expansin (OsEXPB2), which is localized to the plasma membrane adjacent to the cell wall; a novel putative phosphate cotransporter (OsPN23053); and the H⁺-ATPase-like protein OsPN23022 that also interacts with GF14-c.

[0402] The proteins that interacted with OsGF14-c (14-3-3 protein homolog GF14-c) and OsDAD1 are listed in Tables 1 and 2, respectively, followed by detailed information on each protein and a discussion of the significance of the interactions. A diagram of the interactions is provided in FIG. 1. The nucleotide and amino acid sequences of the proteins of the Example are provided in SEQ ID NOs: 1-18 and 114-130.

[0403] Nine of the proteins identified represent rice proteins previously uncharacterized. Based on their presumed biological function and on the ability of the prey proteins to specifically interact with the bait proteins OsGF14-c and OsDAD1, it was speculated that OsGF14-c is a membrane component. Based on the results described below, OsGF14-c is presumably localized to the thylakoid of rice chloroplasts and to other cellular membranes. The proteins interacting in the thylakoid are part of a novel protein complex and are involved in the photosynthetic processes occurring in the chloroplasts. Knowledge of the role of proteins interacting at the thylakoid in rice could be exploited for the development of herbicides specifically targeted to disrupting the structure and function of the thylakoid membrane. The interactions found in this study also identify OsDAD1 as a likely membrane component in rice, an observation consistent with previous reports on other animal and plant DAD homologs.

TABLE 1

Interacting Proteins Identified for OsGF14-c
(14-3-3 protein homolog GF14-c).

| | | | |
|---|---|---|---|
| | | | Prey |
| | Protein Name | Bait | Coord |
| Gene Name | (GENBANK ® Accession No.) | Coord | (source) |

BAIT PROTEIN

| | | | |
|---|---|---|---|
| OsGF14-c | O. sativa 14-3-3 Protein Homolog | 1-257# | |
| PN12464 | GF14-c (U65957) | | |
| (SEQ ID NO: | | | |
| 114) | | | |
| INTERACTORS | | | |
| OsBAB61062 | O. sativa 3-Phosphoshikimate 1- | 1-150 | 463-511 |
| PN22844 | carboxyvinyltransferase (a.k.a. EPSP | | (input |
| (SEQ ID NO: | Synthase)(AB052962; BAB61062.1) | | trait) |
| 116) | | | |
| OsPN22858 | Novel Protein 22858, Fragment, | 1-150 | 27-154 |
| (SEQ ID NO:2) | similar to Arabidopsis GTP | | (input |
| | Cyclohydrolase II (BAB09512.1; e = 0) | | trait) |
| OsPN22874 | Novel Protein 22874, Fragment, | 1-150 | 1-88 |
| (SEQ ID NO:4) | similar to Arabidopsis Putative | | (input |
| | Phosphatidylinositol-4-phosphate 5- | | trait) |
| | kinase (NP_187603.1; 4e⁻¹⁸) | | |
| OsBAA02730 | O. sativa Fructose-Bisphosphate/ | 1-150 | 206-269 |
| PN22832 | Aldolase, Chloroplast Precursor | | (input |
| (Contig4280. | (Q40677) | | trait) |
| fasta.Contig1) | | | |
| (SEQ ID NO: | | | |
| 118) | | | |
| OsRBCL | O. sativa Chloroplast Ribulose | 1-150 | 287-462 |
| PN23426 | Bisphosphate Carboxylase, Large | | (input |
| (SEQ ID NO: | Chain (D00207: P12089) | | trait) |
| 120) | | | |
| OsRCAA1 | O. sativa Ribulose Bisphosphate | 1-150 | 68-210 |
| PN19842 | Carboxylase/Oxygenase Activase, | | (input |
| (SEQ ID NO: | Large Isoform A1 (AB034698, | | trait) |
| 122) | BAA97583) | | |
| OsPN22866 | Novel Protein PN22866, Fragment, | 1-150 | 95-305 |
| (Contig388. | Similar to A. Thaliana Vacuolar ATP | | (input |
| fasta.Contig2) | Synthase Subunit C (V-ATPase C | | trait) |
| (SEQ ID NO:6) | subunit)(Vacuolar proton pump C | | |
| | subunit)(Q9SDS7; e⁻¹⁵²) | | |
| OsPN23022$ | Novel Protein PN23022, Fragment, | 1-150 | 149-285 |
| (SEQ ID NO:8) | similar to H. Vulgare Plasma | | (input |
| | Membrane H⁺-ATPase (CAC50884; | | trait) |
| | e = 0.0) | | |
| OsPN23061 | Hypothetical Protein OsContig3864, | 1-150 | 94-203 |
| (Contig3864. | Similar to H. vulgare Photosystem I | | (input |
| fasta.Contig1) | Reaction Center Subunit II, | | trait) |
| (SEQ ID NO:10) | Chloroplast Precursor (P36213; 6e⁻⁸⁷) | | |
| OsPN23059 | OsContig4331, O. sativa Putative | 1-150 | 193-333 |
| (Contig4331. | 33kDa Oxygen-Evolving Protein of | | 90-169 |
| fasta.Contig1 | Photosystem II (BAB64069) | | (input |
| (SEQ ID NO: | | | trait) |
| 132) | | | |
| OsAAB46718 | O. sativa Photosystem II 10 kDa | 1-150 | 82-126 |
| PN22840 | Polypeptide (U86018; T04177) | | (input |
| (FL_R01_003_H | | | trait) |
| 20.g.1a.Sp6a | | | |
| TMRI) | | | |
| (SEQ ID NO: | | | |
| 126) | | | |
| OsPN29982 | Novel Protein PN29982 | 1-150 | 201-300 |
| (SEQ ID NO:12) | | | (input |
| | | | trait) |
| OsPN30846 | Novel Protein PN30846 | 1-150 | 1-266 |
| (SEQ ID NO:14) | | | (input |
| | | | trait) |
| OsPN30974 | Novel Protein PN30974 | 1-150 | 38-178 |
| (SEQ ID NO:16) | | | (input |
| | | | trait) |

NOTE:
Interactions of GF14-c with the maize transcription factor Viviparous-1 (ZmVP1) and with Em binding protein (EmBp) are also reported in the literature (Schultz et al., 1998).
#Self-activating clone, i.e., it activates the reporter genes in the two-hybrid system in the absence of a prey protein, and thus it was not used in the search.
$ A prey clone of OsPN23022 also interacts with a clone of Defender Against Apoptotic Death 1 (OsDAD1) used as a bait, and the bait OsDAD1 interacts with Beta-Expansin EXPB2 (OsEXPB2) and with Novel Protein 23053, Fragment, Similar to Arabidopsis Putative Na + - Dependent Inorganic Phosphate Cotransporter (OsPN23053). These interactions are shown in TABLE 2 below.

[0404] The names of the clones of the proteins used as baits and found as preys are given. Nucleotide/protein sequence accession numbers for the proteins of the Example (or related proteins) are shown in parentheses under the protein name. The bait and prey coordinates (Coord) are the amino acids encoded by the bait fragment(s) used in the search and by the interacting prey clone(s), respectively. The source is the library from which each prey clone was retrieved.

TABLE 2

Interacting Proteins Identified for OsDAD1
(Defender Against Apoptotic Death 1).

| | | | |
|---|---|---|---|
| | | | Prey |
| | Protein Name | Bait | Coord |
| Gene Name | (GENBANK ® Accession No.) | Coord | (source) |

BAIT PROTEIN

| | |
|---|---|
| OsDAD1 | O. sativa Defender Against |
| PN20251 | Apoptotic Death 1 (D89727; |
| (SEQ ID NO: | BAA24104) |
| 128) | |

INTERACTORS

| | | | |
|---|---|---|---|
| OsPN23022 | Novel Protein PN23022, Fragment, | 30-115 | 37-371 |
| (SEQ ID NO:8) | similar to H. Vulgare Plasma | | (input |
| | Membrane H⁺-ATPase | | trait) |
| | (CAC50884; e = 0.0) | | |
| OsPN23053 | Novel Protein 23053, Fragment, | 30-115 | 2 × 1-180 |
| (SEQ ID NO:18) | Similar to Arabidopsis Putative | | (input |
| | Na⁺-Dependent Inorganic | | trait) |
| | Phosphate Cotransporter | | |
| | (NP_181341.1; e⁻¹⁰⁵) | | |
| OsEXPB2 | Beta-Expansin EXPB2 | 1-115 | 80-207 |
| PN19902 | (U95968; AAB61710) | | (input |
| (SEQ ID NO: | | trait) | |
| 130) | | | |
| | | 30-115 | 183-261 |
| | | | 2 × 80-218 |
| | | | (input |
| | | | trait) |

Two-Hybrid System Using Os GF14-c as Bait

[0405] GF14-c (GENBANK® Accession #U65957) is a 256-amino acid protein that has been reported to interact with site-specific DNA-binding proteins (i.e., basic leucine zipper factor EmBP1) and tissue-specific regulatory factors (i.e., viviparous-1; VP-1; Schultz et al., 1998). It can act to form complexes with EmBP1 and VP-1 to mediate gene expression. The 14-3-3 proteins are found in virtually every eukaryotic organism and tissue and usually consist, in any given organism, of multiple protein isoforms (De Lille et al., 2001). They are thought to act as molecular scaffolds or chaperones and to regulate the cytoplasmic and nuclear localization of proteins with which they interact by regulating their nuclear import/export (Zilliacus et al., 2001; reviewed by Muslin & Xing, 2000). The 14-3-3 proteins bind to a multitude of functionally diverse regulatory proteins involved in cellular signaling pathways, cell cycling, and apoptosis. In plants, enzymes under the control of 14-3-3 proteins include starch synthase, Glu synthase, F1 ATP synthase, ascorbate peroxidase, and affeate o-methyl transferase, plasmamembrane H⁺-ATPase, light- and substrate-regulated metabolic enzymes of the nitrogen and carbon assimilation pathways, and those involved in transcriptional regulation such as the G-box complex and core transcription factors TBP, TFIIB, and EmBP. However, the specific 14-3-3 isoforms required by each of these pathways have not been fully characterized (De Lille et al., supra). The 14-3-3 proteins have previously been detected as participants in protein complexes within the nucleus (Bihn et al., 1997; Imhof & Wolffe, 1999; Zilliacus et al., supra), in the cytoplasm, and mitochondria (De Lille et al., supra). Plant 14-3-3 proteins have also been localized to the chloroplast stroma and the stromal side of thylakoid membranes (Sehnke et al., supra). However, subcellular localization of GF14-c has not been directly assessed and thus its location within the cell is yet to be precisely defined.

[0406] Analysis of the amino acid sequence of QF14-c identified a cAMP- and GMP-dependent phosphorylation site at amino acids 107 to 110, six protein kinase C phosphorylation sites (amino acids 10 to 12, 29 to 31, 56 to 61, 29 to 31, 59 to 61, and 74 to 76), three casein kinase II phosphorylation sites (amino acids 110 to 113, 120 to 123, and 177 to 180), an N-myristoylation site (amino acids 9 to 14), and two amidation sites (amino acids 77 to 80 and 105 to 108). The bait fragment used in this search encodes amino acids 1 to 150 of GF14-c. A BLAST analysis comparing the nucleotide sequence of GF14-c against TMRI's GENECHIP® Rice Genome Array sequence database identified probeset OS009195_at (e⁻⁴⁸ expectation value) as the closest match. Gene expression experiments indicated that this gene is not specifically expressed in several different tissue types and is not specifically induced by a broad range of stresses, herbicides and applied hormones.

[0407] The bait protein encoding amino acids 1 to 150 of GF14-c was found to interact with O. sativa 3-phosphoshikimate 1-carboxyvinyltransferase (a.k.a. EPSP Synthase) (OsBAB61062). OsBAB61062 is a 511-amino acid protein that contains an EPSP synthase signature 1 site (amino acids 162 to 176), an EPSP signature 2 site (amino acids 423 to 441), and it is alanine-rich at the N-terminus. A BLAST analysis of the amino acid sequence of OsBAB61062 determined that this protein is the rice 3-phosphoshikimate 1-carboxyvinyltransferase (also commonly referred to as EPSP synthase) (GENBANK® Accession No. BAB61062.1, 83.9% identity, e=0.0). This 511-amino acid enzyme is located in the chloroplasts where it catalyzes an essential step in aromatic amino acid synthesis, referred to as the shikimate pathway. Because EPSP synthase is essential to algae, higher plants, bacteria, and fungi, but not present in mammals, this enzyme is a useful herbicide and antimicrobial target.

[0408] A BLAST analysis comparing the nucleotide sequence of EPSP synthase against TMRI's GENECHIP® Rice Genome Array sequence database identified probeset OS020639.1_at (e⁻¹⁵⁶ expectation value) as the closest match. Gene expression experiments indicated that this gene is induced by jasmonic acid, a plant hormone involved in signal transduction events associated with a plant's stress response, and by M. grisea, the fungus that causes rice blast disease. The gene is repressed under drought conditions.

[0409] The bait protein encoding amino acids 1 to 150 of GF14-c was found to interact with protein 22858, a fragment which is similar to A. thaliana GTP cyclohydrolase II (OsPN22858). This prey clone of OsPN22858 is a 460-amino acid protein fragment with a transmembrane region spanning amino acids 182 to 198 and a possible cleavage site between amino acids 24 and 25, although no N-terminal signal peptide is present. A BLAST analysis of OsPN22858 determined that its amino acid sequence most nearly matches that of GTP cyclohydrolase 11; 3,4-dihydroxy-2-butanone-4-phoshate synthase from A. thaliana (GENBANK® Accession No. BAB09512.1, 74.4% identity, e=0). GTP cyclohydrolase II catalyzes the first committed reaction in the biosynthesis of the B vitamin riboflavin (Ritz et al., 2001).

[0410] A BLAST analysis comparing the nucleotide sequence of Novel Protein 22858 against TMRI's GENECHIP® Rice Genome Array sequence database identified OS015318_s_at (5e⁻¹⁰ expectation value) as the closest match. The expectation value is too low for this probeset to be a reliable indicator of the gene expression of this GTP cyclohydrolase.

[0411] The bait protein encoding amino acids 1 to 150 of GF14-c was found to interact with Protein 22874, a fragment that is similar to A. thaliana putative phosphatidylinositol-4-phosphate 5-kinase (OsPN22874). A BLAST analysis of OsPN22874 determined that its 89-amino acid sequence most nearly matches that of phosphatidylinositol-4-phosphate 5-kinase (PI4P5K) from A. thaliana (GENBANK® Accession No. NP_{—}187603.1, 65.5% identity, 4e⁻¹⁸). PI4P5K is an enzyme that plays a well-defined role in many signaling events in many species, including the endoplasmic reticulum (ER) stress response in plants (Shank et al., 2001). Animal and yeast PI4P5K phosphorylates phosphatidylinositol-4-phosphate to produce phosphatidylinositol-4,5-bisphosphate as a precursor of two second messengers, inositol-1,4,5-triphosphate and diacylglycerol, and as a regulator of many cellular proteins involved in signal transduction and cytoskeletal organization (reviewed in Mikami et al., 1998). Mikami et al. identified a full-length cDNA clone encoding a PI4P5K protein in A. thaliana whose mRNA expression is induced by treatment of the plant with drought, salt and abscisic acid, suggesting that this protein is involved in water-stress signal transduction (Mikami et al., supra). Elge et al. report that A. thaliana PI4P5K is expressed predominantly in vascular tissues of leaves, flowers and roots, namely in cells of the lateral meristem, i.e., the procambium (Elge et al., 2001).

[0412] The bait protein encoding amino acids 1 to 150 of GF14-c was also found to interact with O. sativa fructose-bisphosphate aldolase, a chloroplast precursor (OsBM02730). OsBM02730 (GENBANK® Accession No. Q40677) is a 388-amino acid protein that includes a fructose-bisphosphate aldolase class-I active site (amino acids 44 and 388), as determined by analysis of the amino acid sequence (8.5e⁻²²⁸). A BLAST analysis of the amino acid sequence of OsBM02730 indicated that this protein is the rice fructose-bisphosphate aldolase, chloroplast precursor (GENBANK® Accession No. Q40677). The gene encoding chloroplastic aldolase was isolated along with that encoding the cytoplasmic form of the enzyme (Tsutsumi et al., 1994). The chloroplastic aldolase is encoded at a single locus, while the cytoplasmic form is distributed between three loci on the genome. Aldolases are present in higher plants as two isoforms, the cytosolic and the chloroplastic types. The cytoplasmic form is highly conserved among plants and appears to be regulated through a Ca²⁺-mediated protein kinase/phosphatase pathway (Nakamura et al., 1996). This enzyme is though to have a role in the fruit ripening process (Schwab et al., 2001). The chloroplastic enzyme is involved in two major sugar phosphate metabolic pathways of green chloroplasts: the C3 photosynthetic carbon reaction cycle (Calvin cycle) and reactions of the starch biosynthetic pathway. In both cases, aldolase catalyzes the formation of fructose 1,6-biphosphate from dihydroxyacetone 3-phosphate and glyceraldehyde 3-phosphate. These topics are reviewed by Michelis et al., 2000, who also identified a 44-kDa heat-induced isoform of the fructose-bisphosphate aldolase in oat chloroplast, confirming its localization to the thylakoid membrane and suggesting that this enzyme is not embedded but rather tends to adhere to the chloroplast membranes. Similar heat-induced thylakoid-associated aldolase homologues were found in other plant species.

[0413] A BLAST analysis comparing the nucleotide sequence of the aldolase protein against TMRI's GENECHIP® Rice Genome Array sequence database identified probeset OS006916.1 at (e⁻¹⁵⁶ expectation value) as the closest match. Our gene expression experiments indicate that this gene is down-regulated by jasmonic acid and drought.

[0414] In addition, the bait protein encoding amino acids 1 to 150 of GF14-c was found to interact with O. sativa ribulose bisphosphate carboxylase large chain precursor (RUBISCO Large Subunit; OsRBCL). A BLAST analysis of the amino acid sequence of OsRBCL determined that this protein is the rice chloroplast ribulose bisphosphate carboxylase, large chain precursor (RuBP carboxylase/oxygenase, also called RUBISCO for short; GENBANK® Accession No. P12089). RUBISCO is a 477-amino acid protein present in the chloroplast of higher plants, with an active site in position 196-204. The chloroplast RuBP carboxylase/oxygenase is part of the CO₂-fixing multienzyme complexes bound to the thylakoid membrane (Suss et al., 1993) with roles in the Calvin cycle reactions that occur in the stroma of the chloroplast during photosynthesis. The starting and ending compound in the Calvin cycle is the five-carbon sugar ribulose 1,5-biphosphate (RuBP). As its name indicates, RuBP carboxylase/oxygenase catalyzes two types of reactions that involve RuBP. In the presence of high carbon dioxide and low oxygen concentrations, the carboxylase activity of RUBISCO is favored and the enzyme catalyzes the initial reaction in the Calvin cycle, the carboxylation of RuBP, leading to the formation of 3-phosphoglyceric acid (PGA). However, in the presence of low carbon dioxide and high oxygen concentrations, oxygen competes with carbon dioxide as a substrate for RUBISCO and the enzyme's oxygenase activity also occurs, resulting in condensation of oxygen with RuBP to form 3-phosphoglycerate and phosphoglycolate. RUBISCO is the world's most abundant enzyme, accounting for as much as 40 percent of total soluble protein in leaves (these topics are discussed in Raven et al., 1999).

[0415] A BLAST analysis comparing the nucleotide sequence of the RUBISCO protein against TMRI's GENECHIP® Rice Genome Array sequence database identified probeset OS000296_s_at (e=0 expectation value) as the closest match. Gene expression experiments indicated that this gene is down-regulated by BAP, 2,4-D, BL2, jasmonic acid, gibberellin, and abscisic acid. The gene is up-regulated under osmotic stress conditions.

[0416] The bait protein encoding amino acids 1 to 150 of GF14-c was found to interact with O. sativa ribulose bisphosphate carboxylase/oxygenase activase, large isoform A1 (OsRCAA1). A BLAST analysis of the amino acid sequence of OsRCAA1 determined that this 466-amino acid protein is the rice RUBISCO activase large isoform precursor (GENBANK® Accession No. BAA97583). It contains two active sites (amino acid 31 to 38 and 156 to 163). RUBISCO activase is an AAA+ (ATPases associated with a variety of cellular activities) protein that facilitates the ATP-dependent removal of sugar phosphates from RUBISCO active sites. This action frees the active site of RUBISCO for spontaneous carbamylation by CO₂ and metal binding, prerequisites for activity (reviewed in Salvucci et al., 2001; Salvucci & Ogren, 1996).

[0417] The bait protein encoding amino acids 1 to 150 of GF14-c was found to interact with protein PN22866, a fragment similar to A. thaliana vacuolar ATP synthase subunit C (V-ATPase C subunit; vacuolar proton pump C subunit) (OsPN22866). OsPN22866 is a 408-amino acid protein fragment. Its amino acid sequence most nearly matches that of A. thaliana Vacuolar ATP synthase subunit C (V-ATPase C subunit) (Vacuolar proton pump C subunit) (Q9SDS7, 72.7% identity, e⁻¹⁵²), as determined by BLAST analysis. The H⁺-translocating ATPases (H⁺-ATPase, V-ATPase) are multi-subunit enzymes that function as essential proton pumps in eukaryotes. The catalytic site of human V-ATPase consists of a hexamer of three A subunits and three B subunits that bind and hydrolyze ATP and are regulated by accessory subunits C, D, and E (van Hille et al., 1993).

[0418] ATPases are essential cellular energy converters that transduce the chemical energy of ATP hydrolysis from transmembrane ionic electrochemical potential differences. The plant ATPases are present in chloroplasts, mitochondria and vacuoles. In vacuoles, ATPases regulate the contents and volume of vacuoles, which depends on the coordinated activities of transporters and channels located in the tonoplast (vacuolar membrane). The V-ATPase uses the energy released during cleavage of the phosphate group of cytosolic ATP to pump protons into the vacuolar lumen, thereby creating an electrochemical H⁺-gradient that is the driving force for transport of ions and metabolites. Thus V-ATPase is important as a ‘house-keeping’ and as a stress response enzyme. Expression of V-ATPase has been shown to be highly regulated depending on metabolic conditions. The V-ATPase consists of several polypeptide subunits that are located in two major domains, a membrane peripheral domain (V₁) and a membrane integral domain (Vₒ). Subunit C is a highly hydrophobic protein containing four membrane-spanning domains. The function of subunit C is unknown, although it is suggested to be directly involved in H⁺ transport and might be involved in stabilization of V₁. The structure, function and regulation of the plant V-ATPase are reviewed in Ratajczak, 2000.

[0419] The bait protein encoding amino acids 1 to 150 of GF14-c was also found to interact with protein PN23022, a fragment similar to H. Vulgare plasma membrane H⁺-ATPase (OsPN23022). Protein PN23022 is a 534-amino acid fragment that includes seven transmembrane domains (amino acids 170 to 186, 202 to 218, 226 to 242, 266 to 282, 308 to 324, 337 to 353, and 373 to 389), as predicted by analysis of its amino acid sequence. A BLAST analysis of the amino acid sequence of OsPN23022 determined that this protein is similar to H. vulgare plasma membrane H⁺-ATPase (GENBANK® Accession No. CAC50884; 88.2% identity, e=0 expectation value), an enzyme that translocates protons into intracellular organelles or across the plasma membrane of eukaryotic cells. A BLAST analysis comparing the nucleotide sequence of Novel protein PN23022 against TMRI's GENECHIP® Rice Genome Array sequence database identified OS000972_f_at (e⁻¹¹ expectation value) as the closest match. The expectation value is too low for this probeset to be a reliable indicator of the gene expression of this ATPase. OsPN23022 was also found to interact with Defender Against Apoptotic Death 1 (OsDAD1; see Table 22).

[0420] The bait protein encoding amino acids 1 to 150 of GF14-c was found to interact with protein OsContig3864, which is similar to H. vulgare photosystem I reaction center subunit II, chloroplast precursor (OsPN23061). Analysis of the OsContig3864 amino acid sequence predicted that it is a 203-amino acid protein containing a possible cleavage site between amino acids 21 and 22, although there appears to be no N-terminal signal peptide. A BLAST analysis determined that the OsContig3864 clone has an amino acid sequence that most nearly matches that of H. vulgare photosystem I reaction center subunit II, chloroplast precursor (Photosystem 120 kDa subunit; PSI-D; GENBANK® Accession No. P36213, 80% identity, 3e-86). The photosystems (photosystems I and II) are large multi-subunit protein complexes embedded into the photosynthetic thylakoid membrane. They operate in series and catalyze the primary step in oxygenic photosynthesis, the light-induced charge separation process by which light energy from the sun is converted to carbon dioxide and carbohydrates in plants and cyanobacteria. Photosystem I catalyzes the light-induced electron transfer from plastocyanin/cytochrome c₆ on the lumenal side of the membrane (inside the thylakoids) to ferredoxin/flavodoxin at the stromal side by a chain of electron carriers (reviewed in Fromme et al., 2001).

[0421] A BLAST analysis comparing the nucleotide sequence of OsContig3864 against TMRI's GENECHIP® Rice Genome Array sequence database identified probeset OS000721_at (e=0 expectation value) as the closest match. Gene expression experiments indicated that this gene is not specifically expressed in several different plant tissue types and is not specifically induced by a broad range of stresses, herbicides and applied hormones.

[0422] The bait protein encoding amino acids 1 to 150 of GF14-c was also found to interact with OsContig4331, an O. Sativa putative 33 kDa oxygen-evolving protein of photosystem II (OsPN23059). The two prey clones retrieved from the input trait library encode amino acids 193 to 333 and 90 to 169 of OsContig4331. These clones are non-overlapping, suggesting that multiple GF14-c-binding sites exist within OsContig4331. Analysis of the OsContig4331 protein sequence predicted that it codes for a 333-amino acid protein. The analysis also indicated that OsContig4331 contains a possible cleavage site between amino acids 37 and 38, although no N-terminal signal peptide is evident. A BLAST analysis of the OsContig4331 amino acid sequence determined that this protein is the rice putative 33 kDa oxygen-evolving protein of photosystem II (GENBANK® Accession No. BAB64069, 90.6% identity, e⁻¹⁶⁹). Photosystem II uses photooxidation to convert water to molecular oxygen, thereby releasing electrons into the photosynthetic electron transfer chain.

[0423] A BLAST analysis comparing the nucleotide sequence of OsContig4331, rice Photosystem I Reaction Center Subunit II Precursor against TMRI's GENECHIP® Rice Genome Array sequence database identified probeset OS000372_at (e=0 expectation value) as the closest match. Our gene expression experiments indicate that this gene is down-regulated during cold stress.

[0424] The bait protein encoding amino acids 1 to 150 of GF14-c was also found to interact with O. Sativa photosystem II 10 kDa polypeptide (OSAAB46718). OSAAB46718 is a 126-amino acid protein fragment that includes a predicted transmembrane domain (amino acids 102 to 118). A BLAST analysis against the Genpept database revealed that OsAAB46718 is the Oryza sativa photosystem II 10 kDa polypeptide (GENBANK® Accession No. T04177, 91.2% identity, 2e⁻⁶¹).

[0425] The bait protein encoding amino acids 1 to 150 of GF14-c was also found to interact with protein PN29982 (OsPN29982). The 300-amino acid sequence of the protein OsPN29982 most nearly matches that of a putative protein of unknown function from A. thaliana (GENBANK® Accession No. NP_{—}196688.1, 47% identity, 3e-054), as determined by BLAST analysis. The second best match was CHICK LIM/homeobox protein Lhx1 (Homeobox protein LIM-1) (GENBANK® Accession No. P53411, 28% identity, e=0.002). Based on the homeoboxdomain, this interaction can be similar to 14-3-3 protein interactions with transcription factors like VP1.

[0426] The bait protein encoding amino acids 1 to 150 of GF14-c was also found to interact with protein PN30846 (OsPN30846). A BLAST analysis of protein OsPN30846 determined that its 266-amino acid sequence most nearly matches that of dynamin homolog from the leguminous plant Astragalus sinicus (GENBANK® Accession No. MF19398.1, 70.6% identity, 2e⁻⁹⁹). Since the discovery of the GTP-binding dynamin in rat brain, dynamin-like proteins have been isolated from various organisms and tissues and shown to be involved in diverse and seemingly unrelated biological processes. Many different isoforms of dynamin-like proteins have been identified in plant cells, and these plant homologs can be grouped into several subfamilies, such as G68/ADL1, ADL2 and ADL3, based on their amino acid sequence similarity (reviewed in Kim et al., 2001). The biological roles have been characterized for a few of these plant dynamin-like proteins. The dynamin-like protein ADL1 from Arabidopsis has been shown to be localized to and to be involved in biogenesis of the thylakoid membranes of chloroplasts (Park et al., 1998). Another Arabidopsis dynamin-like protein, ADL2, is targeted to the plastid, and its recombinant form expressed in E. coli binds specifically to phosphatidylinositol 4-phosphate through the pleckstrin homology (PH) domain present in ADL2 (Kim et al., supra). Based on the similarity between the biochemical properties of ADL2 and those of dynamin and other related proteins, ADL2 can be involved in vesicle formation at the chloroplast envelope membrane.

[0427] The bait protein encoding amino acids 1 to 150 of GF14-c was also found to interact with protein PN30974 (OsPN30974). A BLAST analysis of the novel protein OsPN30974 determined that its 476-amino acid sequence most nearly matches that of an Arabidopsis hypothetical protein of unknown function (GENBANK® Accession No. NP_{—}173623.1, 49% identity, e⁻¹³⁷). The next 13 best hits with an expectation value <e⁻⁵ are all Arabidopsis or rice proteins of unknown function annotated in the public domain.

Two-Hybrid System Using OsDAD1 as Bait

[0428] A second bait protein, namely O. sativa Defender Against Apoptotic Death 1 (OsDAD1), was used to identify interactors. OsDAD1 (GENBANK® Accession No. BAA24104) is a 114-amino acid protein that includes three predicted transmembrane domains (amino acids 33 to 49, 59 to 75, and 94 to 110). DAD1 is a suppressor of programmed cell death, or apoptosis, a process in which unwanted cells are eliminated during growth and development. DAD is a highly conserved protein with homologs identified in animals and plants (Apte et al., 1995; Gallois et al, 1997). Dysfunction and down-regulation of this gene has been linked to programmed cell death in these organisms (Lindholm et al., 2000). DAD1 is an essential subunit of the oligosaccharyltransferase that is located in the ER membrane (Lindholm et al., supra). DAD1 expression declines dramatically upon flower anthesis disappearance in senescent petals and is down-regulated by the plant hormone ethylene (Orzaez & Granell, 1997), which is involved in a variety of stress responses and developmental processes including petal senescence (Shibuya et al., 2000), cell elongation, cell fate patterning in the root epidermis, and fruit ripening (Ecker, 1995).

[0429] Two clones, encoding amino acids 1-115 and 30-115 of OsDAD1, were used as baits in this Example.

[0430] OsDAD1 was found to interact with protein 23053, a fragment which is similar to Arabidopsis putative Na⁺-dependent inorganic phosphate cotransporter (OsPN23053). OsPN23053 is a protein fragment; however, its available 379-amino acid sequence contains five predicted transmembrane regions (amino acids 100 to 116, 118 to 134, 226 to 242, 259 to 275, and 324 to 340) and a cleavable signal peptide (amino acids 1 to 46). A BLAST analysis determined that OsPN23053 is similar to an Arabidopsis putative Na⁺-dependent inorganic phosphate cotransporter (GENBANK® Accession No. NP_{—}181341.1, 55.4% identity, e⁻¹⁰⁵). In mammals, Na⁺-dependent inorganic phosphate cotransporter is present in neuronal synaptic vesicles and endocrine synaptic-like microvesicles as a vesicular glutamate transporter and is responsible for storage of glutamate, the major excitatory neurotransmitter in the mammalian central nervous system (CNS; Takamori et al., 2000). At least two isoforms of Na⁺-dependent inorganic phosphate cotransporter exist (Takamori et al., supra; Aihara et al., 2000) and are expressed in pancreas and brain (Hayashi et al., 2001; Fujiyama et al., 2001). OsPN23053 is the first of a family of Na⁺-dependent inorganic phosphate cotransporters to be discovered in rice. Plants utilize glutamate in important biological processes including protein synthesis and glutamate-mediated signaling (Lacombe et al., 2001). The formation of glutamate from glutamine during nitrogen recycling (Singh et al., 1998) and the control of nitrogen assimilatory pathways by light-signaling (Oliveira et al., 2001) in plants suggest a link between glutamate formation and light-signal transduction.

[0431] OsDAD1 was found to interact with beta-expansin EXPB2 (OsEXPB2). A BLAST analysis of the amino acid sequence of OsEXPB2 determined that this protein is rice beta-expansin (GENBANK® Accession No. AAB61710, 99.6% identity, e⁻¹⁵⁶). Expansins promote cell wall extension in plants. Shcherban et al. isolated two cDNA clones from cucumber that encode expansins with signal peptides predicted to direct protein secretion to the cell wall Shcherban et al., 1995). These authors identified at least four distinct expansin cDNAs in rice and at least six in Arabidopsis from collections of anonymous cDNAs (Expressed Sequence Tags). They determined that expansins are highly conserved in size and sequence and suggest that this multigene family formed before the evolutionary divergence of monocotyledons and dicotyledons. Their analyses indicate no similarities to known functional domains that might account for the action of expansins on wall extension, though a series of highly conserved tryptophans can mediate expansin binding to cellulose or other glycans.

Summary

[0432] The thylakoid membrane of the chloroplasts contains the photosynthetic pigments, reaction centres and electron transport chains associated with photosynthesis. Localization of OsGF14-c to this site is consistent with the interactions of OsGF14-c with the photosystem proteins of this Example. The photosystems (photosystems I and II) are large multi-subunit protein complexes embedded in the thylakoid membrane. As part of a larger group of protein-pigment complexes, the photosynthetic reaction centers, they catalyze the light-induced charge separation associated with photosynthesis. Both photosystems use the energy of photons from sunlight to translocate electrons across the thylakoid membrane via a chain of electron carriers. The electron transfer processes are coupled to a build-up of a difference in proton concentration across the thylakoid membrane. The resulting electrochemical membrane potential drives the synthesis of ATP, which is used to reduce CO₂ to carbohydrates in the subsequent dark reactions. OsGF14-c is found to interact with OsContig3864, similar to photosystem I reaction center subunit II, chloroplast precursor, with OsContig4331, the rice putative 33 kDa oxygen-evolving protein of photosystem II, and with rice photosystem II 10 kDa polypeptide. The validity of these interactions is supported by results in a report by Sehnke et al., 2000, in which yeast two-hybrid technology was used to identify an interaction between a plant 14-3-3 protein and another photosystem I subunit protein, A. thaliana photosystem IN-subunit At pPSI-N. The interactions of OsGF14-c with OsPN23061 (OsContig3864), OsPN23059 (OsContig4331), and OsAAB46718 (photosystem II 10 kDa polypeptide) suggest that OsGF14-c has a role in coupling the physical contact between proteins in or on the periphery of thylakoid membranes.

[0433] Given the interactions of OsGF14-c and components of the chloroplast photosystem, some of the other proteins found to interact with OsGF14-c in this study are likely to be localized to the chloroplast as well, and they are possibly co-located to the thylakoid membrane as interaction complexes. For example, OsGF14-c interacts with EPSP synthase (OsBAB61062), a shikimate pathway enzyme located in the chloroplast, where aromatic amino acid synthesis initiates. It is interesting to note that an enzyme in the shikimate pathway requires a flavin as a cofactor (Bornemann et al., Biochemistry 35(30): 9907-9916, 1996) and that OsGF14-c also interacts with OsPN22858, a novel protein fragment similar to A. thaliana GTP cyclohydrolase II. GTP cyclohydrolase II participates in the biosynthesis of the B vitamin riboflavin, which is a cofactor for enzymes functioning in the shikimate pathway. The interactions of these proteins with OsGF14-c can keep key proteins of the shikimate pathway in close proximity in or at the thylakoid. The interactions of OsGF14-c with chloroplastic aldolase (OsBAA02730), an enzyme shown to be localized to the thylakoid membrane and involved in the sugar phosphate metabolic pathway of chloroplasts, and with the Calvin cycle enzyme RUBISCO (OsRBCL) and RUBISCO activase large isoform precursor (OsRCAA1) further support localization of OsGF14-c and these interactors to the thylakoid membrane. Previous reports have identified a fructose-bisphosphate aldolase isoform at the thylakoid membrane in oat chloroplasts (Michelis et al., supra).

[0434] In addition, a novel interactor identified for OsGF14-c is a putative dynamin homolog (OsPN30846). Plant dynamin-like proteins have been localized to the thylakoid and envelope membranes of chloroplasts Park et al., 1998; Kim et a/2001). Thus it is likely that this rice dynamin homolog is a membrane protein that resides in the chloroplast. This and the fact that other interactors identified for OsGF14-c are present in the thylakoid of chloroplasts substantiates the notion that the 14-3-3 protein functions as a component of the thylakoid or envelope membrane of chloroplasts. In further support of this hypothesis, a recombinant Arabidopsis dynamin-like protein member of the ADL2 subfamily binds specifically to phosphatidylinositol 4-phosphate. The interactions between dynamins and phosphoinositides documented in the literature (reviewed in Kim et al., supra) are consistent with the concomitant presence of the dynamin-like protein OsPN30846 and the phosphatidylinositol-4-phosphate 5-kinase OsPN22874 (rice PI4P5K), both interacting with OsGF14-c, at the thylakoid. We speculate that the interactors described above are part of a protein complex involved in the photosynthetic processes at the thylakoid membrane.

[0435] In addition to components of the chloroplast thylakoid, OsGF14-c was found to interact with proteins similar to a plasma membrane H⁺-ATPase (OsPN23022) and to a vacuolar ATPase (OsPN22866), which suggests that OsGF14-c is also present in plasma and vacuolar membranes. The interactions of OsGF14-c with the ATPases can represent 14-3-3 regulation of the plant turgor pressure. This hypothesis is corroborated by reports of 14-3-3 proteins accomplishing this function via regulation of at least one form of a plasma membrane H+ ATPase (reviewed in DeLille et al., 2001). The interaction of the vacuolar ATPase with OsGF14-c can occur in the vacuolar membrane, but also in membranes of the ER, Golgi bodies, coated vesicles, and provacuoles.

[0436] The biological significance of the interaction of OsGF14-c with the novel protein OsPN22874 (rice PI4P5K) can be defined based on functional homology with A. thaliana PI4P5K, which is induced under water-stress conditions and is expressed in leaves. Given the interaction of OsGF14-c with components of the thylakoid and vacuolar membranes, the rice PIP5K can be located in the chloroplast but it can also reside at the vacuole, with the vacuolar ATPase. In either case, the rice PIP5K can direct synthesis of molecules involved in kinase signaling events associated with chloroplast protection or vacuole size regulation under abiotic stress.

[0437] Two additional interactors, OsPN29982 and OsPN30974, found for OsGF14-c are proteins of unknown function. Nevertheless, because 14-3-3 proteins acts as chaperones, these interactions can represent a process in which the prey proteins achieve proper protein folding, or OsGF14-c can be responsible for proper subcellular localization of OsPN29982 and OsPN30974. Because all other interactors for OsGF14-c appear to be membrane-associated proteins, OsPN29982 and OsPN30974 are likely to be membrane proteins and can reside at the thylakoid or other cellular membrane structures.

[0438] In summary, some of the rice proteins found to interact with OsGF14-c appear to be located at the thylakoid membrane where they participate in photosynthetic processes occurring in the chloroplast; these interactions are consistent with previously reported localization of 14-3-3 proteins to the chloroplast stroma and the stromal side of thylakoid membranes (Sehnke et al., 2000). Other interactors identified are associated with the plasma or vacuolar membrane. OsGF14-c is, thus, likely to be a membrane component in rice. Because 14-3-3 proteins participate in many types of signaling pathways and are thought to act as molecular chaperones necessary for the assembly, unfolding or transport of proteins through membranes, it is likely that OsGF14-c functions as a molecular glue or stabilizer to regulate the function of the proteins with which it interacts at the thylakoid or other membrane structures. The identification of OsGF14-c as a membrane component represents a novel observation and the first functional characterization of the GF14-c protein in rice. In particular, the proteins identified in this Example as interacting at the thylakoid membrane of chloroplasts represent a novel rice protein complex.

[0439] Three interactors were identified in this study for OsDAD1. One is the putative plasma membrane H⁺-ATPase (OsPN23022) that interacts with OsGF14-c. Evidence exists that both OsDAD1 and H⁺-ATPase are integral membrane proteins (Lindholm et al., 2000; Ratajczak et al., 2000). H⁺-ATPase translocates protons into intracellular organelles or across the plasma membrane of specialized cells, its activity resulting in acidification of intracellular compartments in eukaryotic cells. The acidic interior of lysosomes has been shown to be necessary for apoptosis under some conditions (Kagedal et al., 2001; Bursch, 2001). Thus, the activities of these two enzymes can be necessary for regulation of programmed cell death, and their physical interaction can represent a step in control of this event. Furthermore, 14-3-3 proteins have been implicated in regulation of many cellular processes including apoptosis (van Hemert et al., 2001). It is possible that the interactions of OsPN23022 with GF14-c and with OsDAD1 represent steps in such regulation.

[0440] Another novel interactor found for OsDAD1 is the novel rice Na⁺-dependent inorganic phosphate cotransporter. We speculate that the rice phosphate cotransporter is also a membrane protein based on functional homology with its mammalian homologs, which are localized to neuronal and endocrine vesicles and have a role in glutamate storage (Takamori et al., 2000). It is likely that glutamate participates in apoptosis regulation in plants as it does in mammals (Bezzi et al., 2001), and that this occurs in rice through the association of the phosphate cotransporter OsPN23053 with OsDAD1.

[0441] Finally, OsDAD1 was found to interact with the rice beta-expansin. Expansins are localized to the plasma membrane adjacent to the cell wall, from which they mediate cell wall extension. Since genes regulating cell death are part of the defense response, this interaction can be associated with structural changes in the cell wall in response to cell death.

[0442] The interactions here reported represent the first characterization of the DAD1 protein homolog in rice. Notably, the fact that OsDAD1 and its interactors appear to be membrane proteins and that one of them, OsPN23022, interacts with OsGF14-c lend further support to the notion that OsGF14-c is a membrane component.

### Example II

[0443] The rice senescence-associated protein (Os006819-2510) shares 61.4% amino acid sequence similarity with daylily Senescence-Associated Protein 5, a protein encoded by one (DSA5) of six cDNA sequences the levels of which increase during petal senescence. Transcripts of these genes are found predominantly in petals, their expression increase during petal but not leaf senescence, and they are induced by a concentration of abscisic acid (ABA) that causes premature senescence of the petals. Petal senescence is an example of endogenous programmed cell death, or apoptosis, a process in which unwanted cells are eliminated during growth and development. Genes performing a regulatory function in cell death or survival are important to developmental processes. The rice senescence-associated protein Os006819-2510 was chosen as a bait for these interaction studies based on its potential relevance to plant growth and development.

[0444] To identify proteins that interacted with the rice senescence-associated protein Os006819-2510, an automated, high-throughput yeast two-hybrid assay technology (provided by Myriad Genetics Inc., Salt Lake City, Utah) was employed, as has been described above.

Results

[0445] The rice senescence-associated protein Os006819-2510 was found to interact with eight rice proteins. Five interactors are known, namely, the rice histone deacetylase HD1 (OsAAK01712), an enzyme involved in regulation of core histone acetylation; the calcium-binding protein calreticulin precursor (OsCRTC), which also interacts with the starch biosynthetic enzyme soluble starch synthase (OsSSS) and with a novel protein (OsPN29950) of unknown function; low temperature-induced protein 5 (OsLIP5); the dehydrin RAB 16B, which is induced by water stress; and rice putative myosin (OsPN23878), an actin motor protein which also interacts with a putative calmodulin-kinase that is associated with a network of proteins involved in cell cycle regulation (see Examples I and II). Three interactors for senescence-associated protein are novel proteins including a putative calllose synthase (OsPN23226), an enzyme involved in the biosynthesis of the glucan callose; a protein similar to barley coproporphyrinogen III oxidase, chloroplast precursor, an enzyme of the chlorophyll biosynthetic pathway (OsPN23485); and a protein similar to Arabidopsis Gamma Hydroxybutyrate Dehydrogenase.

[0446] The interacting proteins of this Example are listed in Tables 3-5, followed by detailed information on each protein and a discussion of the significance of the interactions. The nucleotide and amino acid sequences of the proteins of the Example are provided in SEQ ID NOs: 19-30 and 131-138.

[0447] Note that several prey proteins identified are, like the bait protein Os006819-2510, membrane-associated molecules (OsCRTC, OsPN23226, OsLIP5). Several appear to be associated with cell cycle processes in rice (OsPN23878, Os003118-3674, OsCRTC, OsSSS, OsPN23226, OsAAK01712), while others are involved in the plant stress response (OsRAB16B, OsLIP5, OsCRTC). Some of the proteins identified represent rice proteins previously uncharacterized. Based on the presumed biological function of the prey proteins and on their ability to specifically interact with the bait protein Os006819-2510, Os006819-2510 is speculated to be involved in cell cycle/mitotic processes and in the plant resistance to stress, and can actually represents a link between these processes in rice.

[0448] Proteins that participate in cell cycle regulation in rice can be targets for genetic manipulation or for compounds that modify their level or activity, thereby modulating the plant cell cycle. The identification of genes encoding these proteins can allow genetic manipulation of crops or application of compounds to effect agronomically desirable changes in plant development or growth. Likewise, genes that are involved in conferring plants resistance to stress have important commercial applications, as they could be used to facilitate the generation and yield of crops.

TABLE 3

Interacting Proteins Identified for Os006819-2510
(Hypothetical Protein 006819-2510. Similar to
Hemerocallis Senescence-Related Protein 5).

| | | | |
|---|---|---|---|
| | | | Prey |
| | Protein Name | Bait | Coord |
| Gene Name | (GENBANK ® Accession No.) | Coord | (source) |

BAIT PROTEIN

| | |
|---|---|
| Os006819-2510 | Hypothetical Protein 006819-2510, |
| PN20462 | Similar to Senescence-Related |
| (SEQ ID NO: | Protein 5 from Hemerocallis Hybrid |
| 20) | Cultivar (AAC34855.1; e⁻⁹⁷) |

INTERACTORS

| | | | |
|---|---|---|---|
| OsAAK01712 | O. sativa Histone Deacetylase HD1 | 1-150 | 90-221 |
| PN24059 | (AF332875; AAK01712.1) | | (output |
| (SEQ ID NO: | | | trait) |
| 132) | | | |
| OsCRTC* | O. sativa Calreticulin Precursor | 1-273 | 283-301 |
| PN20544 | (AB021259; BAA88900) | | (output |
| (SEQ ID NO: | | | trait) |
| 134) | | | |
| OsLIP5 | Oryza sativa Low Temperature- | 1-150 | 29-60 |
| PN22883 | Induced Protein 5 (AB011368; | | (input |
| (SEQ ID NO: | BAA24979.1) | | trait) |
| 136) | | | |
| OsPN23878# | Oryza sativa Putative Myosin | 1-150 | 685-888 |
| (SEQ ID NO: | (AC090120; AAL31066.1) | | (output |
| 138) | | | trait) |
| OsRAB16B | O. sativa DEHYDRIN RAB 16B | 1-273 | 147-164 |
| PN20554 | (P22911) | | (output |
| (SEQ ID NO: | | | trait) |
| 140) | | | |
| OsPN23226 | Novel Protein PN23226, Callose | 1-273 | 345-432 |
| (SEQ ID NO: | synthase | | (output |
| 22) | | | trait) |
| OsPN23485 | Novel Protein PN23485, Similar to | 1-273 | 90-243 |
| (SEQ ID NO: | Hordeum vulgare Coproporphyrinogen | | (output |
| 24) | III Oxidase, chloroplast precursor | | trait) |
| | (Q42840; e⁻¹⁶⁹) | | |
| OsPN29037 | Novel Protein PN29037 | 1-150 | 73-165 |
| (SEQ ID NO: | | | (input |
| 26) | | | trait) |

*Additional interactions identified for OsCRTC are listed in TABLE 4
#Additional interactions identified for OsPN23878 are listed in TABLE 5

[0449] The names of the clones of the proteins used as baits and found as preys are given. Nucleotide/protein sequence accession numbers for the proteins of the Example (or related proteins) are shown in parentheses under the protein name. The bait and prey coordinates (Coord) are the amino acids encoded by the bait fragment(s) used in the search and by the interacting prey clone(s), respectively. The source is the library from which each prey clone was retrieved.

TABLE 4

| | | | |
|---|---|---|---|
| | | | Prey |
| | Protein Name | Bait | Coord |
| Gene Name | (GENBANK ® Accession No.) | Coord | (source) |

BAIT PROTEIN

| | |
|---|---|
| OsCRTC | Calreticulin Precursor (AB021259; |
| PN20544 | BAA88900) |
| (SEQ ID NO: | |
| 134) | |

INTERACTORS

| | | | |
|---|---|---|---|
| OsPN29950 | Novel Protein PN29950 | 1-150 | 7-103 |
| (SEQ ID NO: | | | 2 × 138-343 |
| 28) | | | 50-343 |
| | | | (output |
| | | | trait) |
| OsSSS | Soluble Starch Synthase | 250-425 | 68-270 |
| PN19701 | (AF165890; AAD49850) | | (input |
| (SEQ ID NO: | | | trait) |
| 142) | | | 97-263 |
| | | | (output |
| | | | trait) |

[0450] TABLE 5

| | | | |
|---|---|---|---|
| | | | Prey |
| | Protein Name | Bait | Coord |
| Gene Name | (GENBANK ® Accession No.) | Coord | (source) |

PREY PROTEIN

| | | | |
|---|---|---|---|
| OsPN23878 | Oryza sativa Putative Myosin | | |
| (SEQ ID NO: | (AC090120; AAL31066.1) | | |
| 138) | | | |
| BAIT PROTEIN | | | |
| Os003118- | Hypothetical Protein 003118-3674 | 75-149 | 824-935 |
| 3674 | Similar to Lycopersicon | | (output |
| PN20551 | esculentum Calmodulin | | trait) |
| (SEQ ID NO: | | | |
| 30) | | | |

[0451] Os006819-2510 is a 276-amino acid protein that includes a cleavable signal peptide (amino acids 1 to 27) and three transmembrane domains (amino acids 48 to 64, 82 to 98, and 233 to 249), as predicted by analysis of its amino acid sequence. The analysis also predicted two endoplasmic reticulum retention motifs, one N-terminal (AFRL) and the other C-terminal (KGGY), and a prokaryotic membrane lipoprotein lipid attachment site beginning with amino acid 57 (Prosite). This site, when functional, is a region of protein processing. Analysis by Pfam also identified a transmembrane superfamily domain, also called a tetraspanin family domain, typically found in a group of eukaryotic cell surface antigens that are evolutionarily related and include transmembrane domains.

[0452] A BLAST analysis against the Genpept database indicated that Os006819-2510 is similar to Senescence-Associated Protein 5 from Hemerocallis hybrid cultivar (daylily; GENBANK® Accession No. AAC34855.1; 61.4% identity; e⁻⁹⁷). In agreement with this result, the protein with the amino acid sequence most similar (63% identity) to that of Os006819-2510 in Myriad's proprietary database is Hypothetical Protein 005991-3479, Similar to Hemerocallis Senescence-Associated Protein 5 (Os005991-3479). In an effort to identify the components of the genetic program that leads daylily petals to senescence and cell death ca. 24 hours after the flower opens, the cDNA encoding senescence-associated protein 5 in petals was isolated as one of six cDNAs (designated DSA3, 4, 5, 6, 12 and 15) whose levels increase during petal senescence (Panavas et al., 1999). However, no sequence homology was identified in the public database for the DSA5 gene product, which remains as yet unidentified. The levels of DSA mRNAs in leaves was determined to be less than 4% of the maximum detected in petals, with no differences between younger and older leaves, and the DSA genes (except DSA12) are expressed at low levels in daylily roots and (except DSA4) induced by a concentration of abscisic acid that causes premature senescence of the petals.

[0453] Two bait fragments, encoding amino acid 1-273 and 1-150, of Os006819-2510 were used in the yeast two-hybrid screen.

[0454] A bait fragment encoding amino acids 1-150 of Os006819-2510 was found to interact with O. sativa histone deacetylase HD1 (OsAAK01712). A BLAST analysis of the amino acid sequence of OsAAK01712 indicated that this prey protein is the rice Histone Deacetylase HD1 (GENBANK® Accession No. AAK01712.1, 100% identity, e=0.0). Histone deacetylase (HD) enzymes have been isolated from plants, fungi and animals (reviewed by Lechner et al., 1996). The enzymatic activity of histone deacetylase and that of histone acetyltransferase maintain the enzymatic equilibrium of reversible core histone acetylation. Core histones are a group of highly conserved nuclear proteins in eukaryotic cells; they represent the main component of chromatin, the DNA-protein complex in which chromosomal DNA is organized. Besides their role in chromatin structural organization, core histones participate in gene regulation, their regulatory function being ascribed to their ability to undergo reversible posttranslational modifications such as acetylation, phosphorylation, glycosylation, ADP-ribosylation, and ubiquitination. Histone deacetylase exists as multiple enzyme forms, and this multiplicity reflects the complex regulation of core histone acetylation. Four nuclear HDs have been identified and characterized from germinating maize embryos (HD1-A, HD1-BI, HD1-BII, and HD2), based on their expression during germination, molecular weight, physiochemical properties and inhibition by various compounds. Based on these data, Lechner et al., supra, suggest that HD enzymes have a role in establishing and maintaining histone-protein interactions, and that acetylation can modulate the binding of proteins with anionic domains to certain chromatin areas.

[0455] Os006819-2510 was found to interact with O. sativa Calreticulin Precursor (OsCRTC). A BLAST analysis of the amino acid sequence of the prey clone OsCRTC indicated that this protein is the rice Calreticulin Precursor (GENBANK® Accession No. BM88900/SwissProt #Q9SLY8, 100% identity, e=0.0). OsCRTC is a 424-amino acid protein with a cleavable signal peptide (amino acids 1 to 29), a calreticulin family repeat motif (amino acids 218 to 230), and an endoplasmic reticulum targeting sequence (amino acids 421 to 424), as predicted by analysis of the OsCRTC amino acid sequence (see Munro & Pelham, 1987; Pelham, 1990). In agreement with its designation as a calreticulin precursor, the analysis identified a calreticulin family signature calreticulin family signature (amino acids 31 to 343, 1.3e⁻¹⁶⁶; see Michalak et al., 1992; Bergeron et al., 1994; Watanabe et al., 1994). The analysis also predicted a transmembrane domain (amino acids 7 to 29) and a coiled coil (amino acids 360 to 389). The cDNA encoding the rice calreticulin OsCRTC was first identified by Li & Komatsu, who found this gene to be involved in the regeneration of rice cultured suspension cells. These authors report that the rice calreticulin protein is highly conserved, showing high homology (70-93%) to other plant calreticulins, but only 50-53% homology to mammalian calreticulins. Calreticulin (CRT) is an endoplasmic reticulum (ER) calcium-binding protein thought to be involved in many functions in eukaryotic cells, including Ca²⁺ signaling, regulation of intracellular Ca²⁺ storage and store-operated Ca²⁺ fluxes through the plasma membrane, modulation of endoplasmic reticulum Ca²⁺-ATPase function, chaperone activity to promote protein folding, control of cell adhesion, gene expression, and apoptosis (reviewed by Michalak et al., 1998 and by Persson et al.,). In plants, CRT has been localized to the endoplasmic reticulum, Golgi, plasmodesmata, and plasma membrane (Borisjuk et al., 1998; Hassan et al., 1995; Baluska et al., 2001), and it has been shown to affect cellular calcium homeostasis, as reported by Persson et al., supra. This study shows that induction of calreticulin expression in transgenic tobacco and Arabidopsis plants enhances the ATP-dependent Ca²⁺ accumulation of the endoplasmic reticulum, and that this CRT-mediated alteration of the ER Ca²⁺ pool regulates ER-derived Ca²⁺ signals. These results demonstrate that CRT plays a key role as a regulator of calcium storage in the endoplasmic ER, and that the ER, in addition to the vacuole, is an important Ca²⁺ store in plant cells. A role for the Arabidopsis calreticulin homolog in anther maturation or dehiscence has also been proposed (Nelson et al., 1997) based on localization of this protein in anthers which are degenerating at the time of maximum CRT expression. Furthermore, the tobacco homolog of mammalian CRTC participates in protein-protein interactions in a stress- and ATP-dependent fashion Denecke et al., 1995). This notion supports the use of the yeast two-hybrid technology to identify proteins that interact with OsCRTC.

[0456] OsCRTC was also used as bait and found to interact with rice Soluble Starch Synthase (OsSSS; see Table 24) and Novel Protein PN29950 (OsPN29950). OsSSS is the rice homolog of soluble starch synthase (SSS), one of the three enzymes involved in starch biosynthesis in plants. Starch is the major component of yield in the world's main crop plants and one of the most important products synthesized by plants that is used in industrial processes. It consists of two kinds of glucose polymers: highly branched amylopectin and relatively unbranched amylose. Starch synthase contributes to the synthesis of amylopectin. The enzyme utilizes the glucosyl donor ADPGlc to add glucosyl units to the nonreducing end of a glucan chain through □(1→4) linkages, thus elongating the linear chains (reviewed by Cao et al., 2000; Kossman & Lloyd, 2000). Distinct classes of isoforms of starch synthase were defined on the basis of similarity in amino acid sequence, molecular mass, and antigenic properties. Plant organs vary greatly in the classes they possess and in the relative contribution of the classes to soluble starch synthase activity (Smith et al., 1997 cited in Cao et al., supra). OsPN29950 is a protein of unknown function determined by BLAST analysis to be similar to putative protein from Arabidopsis thaliana (GENBANK® Accession No. NP_{—}199037.1, 32% identity, 2e⁻²⁹).

[0457] Os006819-2510 was found to interact with low temperature-induced protein 5 (OsLIP5). OsLIP5 is a 276-amino acid protein with a cleavable signal peptide (amino acids 1 to 27) and three putative transmembrane regions (amino acids 48 to 64, 82 to 98, and 233 to 249). A BLAST analysis of the amino acid sequence of this prey clone determined that it is the rice LIP5 protein (GENBANK® Accession No. BAA24979.1, 100% identity, 8e⁻⁰⁵²). The rice LIP5 protein is a direct submission to the public database and is not described in the literature. In yeast, LIP5 is involved in lipoic acid metabolism (Sulo & Martin, 1993). The BLAST analysis shows that the rice LIP5-like protein OsLIP5 is also similar to rice WS1724 (GENBANK® Accession No. T07613, 98% identity, 3e⁻⁰⁵¹), a protein encoded by one of nine cDNAs induced by short-term water stress and thought to be responsible for acquired resistance to chilling in a chilling-sensitive variety of rice (Takahashi et al., 1994). Among the proteins encoded by these cDNAs, which were found to be differentially expressed following water stress, expression of the WS1724 protein remained relatively fixed. A BLAST analysis comparing the nucleotide sequence of OsLIP5 against TMRI's GENECHIP® Rice Genome Array sequence database identified probeset OS000070_r_at (e=4e⁻⁷⁵) as the closest match. Gene expression experiments indicated that this gene is down-regulated by the herbicide BL2.

[0458] Os006819-2510 was also found to interact with Oryza sativa putative myosin (OsPN23878). A BLAST analysis of the amino acid sequence of OsPN23878 indicated that this prey protein is the rice putative myosin (GENBANK® Accession No. AAL31066.1, 99% identity, e=0.0). OsPN23878 is also similar to Myosin VIII, ZMM3—maize (fragment) from Z. mays (GENBANK® Accession No. A59311, 89% identity, e=0.0). Myosins are discussed in Example I. Based on current knowledge of plant myosins, the myosin VIII prey protein OsPN23878 can be a cytoskeletal component that participates in events relating to cytokinesis.

[0459] The prey protein OsPN23878 also interacts with hypothetical protein 003118-3674, which is similar to Lycopersicon esculentum Calmodulin (Os003118-3674; see Table 25). Os003118-3674 is a 148-amino acid protein with two EF-hand calcium-binding domains (amino acids 22 to 34 and 93 to 105). In agreement with the observation that Os003118-3674 includes EF-hand calcium-binding domains, a BLAST analysis of the Genpept database indicated that this protein shares 72% identity with A. thaliana putative calmodulin (GENBANK® Accession No. NP_{—}1764705, e⁻⁵⁷), although the top hit in this search is A. thaliana putative serine/threonine kinase (GENBANK® Accession No. NP_{—}172695.1, 76% identity, 7e⁶⁰). Therefore, the possibility that this calmodulin-like protein possesses kinase activity is worth consideration.

[0460] A BLAST analysis comparing the nucleotide sequence of OsPN23878 against TMRI's GENECHIP® Rice Genome Array sequence database identified probeset OS002190_I_at (e⁻¹⁶⁵) as the closest match. Our gene expression experiments indicate that this gene is not specifically induced under a range of given conditions.

[0461] Additionally, Os006819-2510 was found to interact with OsRAB16B (OsRAB16B), a 164-amino acid protein that has a possible cleavage site between amino acids 51 and 52, although it does not appear to have a cleavable signal peptide. Analysis of its amino acid sequence predicted (2.6e⁻⁸¹) this protein to be a member of a group of plant proteins called dehydrins, which are induced in plants by water stress (see Close et al., 1989; Robertson & Chandler, 1992; Dure et al., 1989). Dehydrins include the basic, glycine-rich RAB (responsive to abscisic acid) proteins. In agreement with this notion, the analysis indicated that OsRAB16B is a basic, glycine-rich protein. A BLAST analysis against the public database revealed that OsRAB16B is the rice DEHYDRIN RAB 16B (GENBANK® Accession No. P22911, 100% identity, 4e⁻⁹⁵). The cDNA encoding this protein was isolated by (Yamaguchi-Shinozaki et al., 1990) as one of four rice RAB genes that are differentially expressed in rice tissues. In agreement with the notion that OsRAB16B is a rice RAB protein, a BLAST analysis against Myriad's proprietary database indicated that OsRAB16B shares 57% identity with OsRAB25. While expression data for OsRAB16B are not available, the rice RAB16B promoter contains two abscisic acid (ABA)-responsive elements required for ABA induction (Ono et al., 1996). Among other rice RAB proteins, the RAB16A gene has been linked to salt stress (Saijo et al., 2001), and the activity of the RAB16A promoter is also induced by ABA and by osmotic stresses in various tissues of vegetative and floral organs (Ono et al., supra). Another rice RAB protein, RAB21, is induced in rice embryos, leaves, roots and callus-derived suspension cells treated with NaCl and/or ABA (Mundy & Chua, 1988). Based on these data, it is likely that the OsRAB16B prey protein has a role in the stress response.

[0462] Os006819-2510 was found to interact with protein PN23226 (OsPN23226).

[0463] A BLAST analysis against the public database indicated that OsPN23226 is similar to putative glucan synthase (GENBANK® Accession No. NP_{—}563743.1, 78% identity, e=0.0) and to callose synthase 1 catalytic subunit (GENBANK® Accession No. NP_{—}563743.1, 78% identity, e=0.0) from A. thaliana. Callose synthase (CalS) from higher plants is a multisubunit membrane-associated enzyme involved in callose synthesis (reviewed in Hong et al., 2001). Callose is a linear 1,3-β-glucan with some 1,6-branches and differs from cellulose, the major component of the plant cell wall. Callose is synthesized on the forming cell plate and several other locations in the plant, and its deposition at the cell plate precedes the synthesis of cellulose. Callose synthesis can also be induced by wounding, pathogen infection, and physiological stress. The activity of callose synthase is highly regulated during plant development and can be affected by various biotic and abiotic factors. CalS, like cellulose synthase, is a large transmembrane protein. Its structure includes a large hydrophilic loop that is relatively conserved among the CalS isoforms, a less conserved, long N-terminal segment, and a short C-terminal segment, all located on the cytoplasmic side. The central loop is thought to act as a receptacle to hold other proteins that are essential for CalS catalytic activity (see below); the N-terminal segment can contain subdomains for interaction with proteins that regulate 1,3-β-glucan synthase activity.

[0464] The cDNA encoding the callose synthase (CalS1) catalytic subunit from Arabidopsis was identified by Hong et al., supra), who demonstrated that higher plants encode multiple forms of CalS enzymes and that the Arabidopsis CalS1 is a cell plate-specific isoform. In addition, these authors used yeast two-hybrid and in vitro experiments to show that CalS1 interacts with two other cell plate-specific proteins, phragmoplastin and a UDP-glucose transferase, and suggest that it can form a large complex with these and other proteins to facilitate callose deposition on the cell plate. Moreover, the plasma membrane CalS is strictly Ca²⁺-dependent, and Ca²⁺ plays a key role in cell plate formation and can activate the cell plate-specific CalS1. The prey protein OsPN23226 is likely a rice callose synthase homolog that can function similarly to the Arabidopsis CalS1 catalytic subunit.

[0465] In addition to the cell plate, callose is synthesized in a variety of specialized tissues and in response to mechanical and physiological stresses. Multiple CalS isozymes are thought to be required in higher plants to catalyze callose synthesis in different locations and in response to different physiological and developmental signals (Hong et al., supra).

[0466] Os006819-2510 was also found to interact with protein PN23485, which is similar to Hordeum vulgare coproporphyrinogen III oxidase, chloroplast precursor (OsPN23485). A BLAST analysis of the amino acid sequence of OsPN23485 determined that this protein is similar to barley (H. vulgare) Coproporphyrinogen III Oxidase, Chloroplast Precursor (coprogen oxidase) (GENBANK® Accession No. Q42840, 89.3% identity, e⁻¹⁶⁹). Coproporphyrinogen III oxidase (CPO) catalyzes a step in the pathway from 5-amino-levulinate to protoporphyrin IX, a common reaction in the biosynthesis of heme in animals and chlorophyll in photosynthetic organisms. The N-terminal sequences of plant CPOs are characteristic of plastid transit peptides. CPO is exclusively located in the stroma of plastids, and in vitro transcribed and translated CPO is imported into the stroma of pea plastids and truncated by a stromal endopeptidase (reviewed by Ishikawa et al., 2001). Plant cDNA sequences encoding CPO were obtained from soybean, tobacco and barley (Kruse et al., 1995). They found that the plant coprogen oxidase mRNA was expressed to different extents in various tissues, with maximum amounts in developing cells and drastically decreased amounts in completely differentiated cells, suggesting differing requirements for tetrapyrroles in different organs. Based on these results, these authors propose that enzymes involved in tetrapyrrole (porphyrin) synthesis are regulated developmentally rather than by light, and that regulation of these enzymes guarantees a constant flux of metabolic intermediates and help avoid photodynamic damage by accumulating porphyrins. Inhibition of the pathway for chlorophyll synthesis causes lesion formation such as that found in the pale green and lesion-formation phenotype of lin2 plants. Ishikawa et al., supra found that a deficiency of coproporphyrinogen III oxidase causes lesion formation in these Arabidopsis mutants. Furthermore, based on the observation that transgenic tobacco plants with reduced CPO activity accumulate photosensitizing tetrapyrrole intermediates and exhibit antioxidative responses and necrotic leaf lesions, these authors suggest that CPO inhibition causes lesion formation leading to induction of a set of defense responses that resemble the HR observed after pathogen attack. These lesions are the equivalent of diseases known as porphyrias in humans. If accumulated, coproporphyrin(ogen), as a photosensitizer, induces damage through generation of reactive oxidative species, which play a key role in the initiation of cell death and lesion formation both in the HR and in certain lesion mimic mutants. They suggest that in lin2 mutants, the generation of an oxidative burst triggered by coproporphyrin accumulation leads to cell death.

[0467] Os006819-2510 was found to interact with protein PN29037 (OsPN29037). A BLAST analysis of the amino acid sequence of OsPN29037 indicated that this prey protein is similar to Gamma Hydroxybutyrate Dehydrogenase from A. thaliana (GENBANK® Accession No. MK94781.1, 80.7%, identity, e⁻¹²⁷). This enzyme oxidizes gamma-hydroxybutyrate. As a minor brain metabolite directly or indirectly involved in scavenging oxygen-derived free radicals in animals, gamma-hydroxybutyrate demonstrates similarities with melatonin (Cash, 1996).

Summary

[0468] Thus, the senescence-associated protein Os006819-2510 interacts with several proteins that have possible roles in cell cycle processes. One of these is OsPN23878, a protein annotated in the public domain as the rice putative myosin. Myosins are cytoskeletal proteins that function as molecular motors in ATP-dependent interactions with actin filaments in various cellular events. Based on the similarity of the prey protein to a class VIII myosin and on the reported role of plant myosin VIII in maturation of the cell plate and in organization of the actin cytoskeleton at cytokinesis, we speculate that the myosin OsPN23878 is a cytoskeletal component that participates in events occurring at cytokinesis in rice. The association of the myosin OsPN23878 with senescence-associated protein can be a step in cell-cycle-dependent events involving cytoskeleton organization and senescence. Specific expression of the gene encoding OsPN23878 in panicle (our gene expression experiments) is consistent with an interaction between this protein and Os006819-2510, and with a role for the latter in flower senescence, as suggested for the gene encoding the daylily homolog of this protein (Panavas et al., 1999). Localization of senescence-associated protein to the ER suggests that some of the events in which OsPN23878 functions could be associated with plasmodesmata function.

[0469] Note that the myosin protein OsPN23878 also interacts with a novel calmodulin-kinase-like protein Os003118-3674 (see Table 25), and that the latter interacts with a myosin heavy chain (OsAAK98715) found to interact with rice cyclin OsCYCOS2 and presumed to be involved in cytoskeleton organization during mitotic events. The interactions of myosins with a calcium-binding calmodulin-like protein are consistent with published evidence of regulation of myosin function by calcium (Yokota et al., 1999, reviewed in Reddy, 2001). The possibility that Os003118-3674 possesses kinase activity raises the probability that these interactions propagate a cell-cycle-related signaling event. The calmodulin-like protein Os003118-3674 thus provides a link between the senescence-associated protein and interacting partners of this Example and the cell cycle network.

[0470] Another interactor with a possible role in cell cycle regulation is the rice histone deacetylase OsAAK01712. This enzyme includes a transmembrane domain and is involved in regulation of core histones acetylation. The acetylation/deacetylation of histones, the main protein component of chromatin, is connected to replication during the cell cycle in plants, as is in other eukaryotes (Jasencakova et al., 2001). Thus, the Os006819-2510-OsAAK01712 interaction likely participates in mitotic events involving chromatin organization.

[0471] Another novel interactor found for senescence-associated protein is OsPN23485, similar to coproporphyrinogen III oxidase, chloroplast precursor, an enzyme of the pathway leading to the biosynthesis of chlorophyll in plants. The observation that the lesion formation in the lin2 mutant Arabidopsis plants is the result of loss-of-function of CPO (Ishikawa et al., 2001) links the gene encoding CPO to regulation of cell death pathways. Moreover, plant CPO enzymes are regulated developmentally and by light (reviewed by Ishikawa et al., supra). Based on these reports, the interaction of rice CPO (OsPN23485) with senescence-associated protein can participate in regulation of programmed cell death in a development-dependent manner in rice.

[0472] The senescence-associated protein Os006819-2510, which is presumed to be a transmembrane protein based on analysis of its amino acid sequence, interacts with the rice calreticulin OsCRTC which, like other plant calreticulins, is likely an ER transmembrane protein. The presence of two endoplasmic reticulum retention motifs in Os006819-2510 and of an endoplasmic reticulum targeting sequence in OsCRTC suggests that both proteins are localized in the ER. This notion is in agreement with the possibility of an interaction between Os006819-2510 and OsCRTC in planta. Os006819-2510 can participate in events controlled by OsCRTC within the endoplasmic reticulum. This interaction is consistent with the suggested role of plant CRT in anther maturation and dehiscence, which was proposed by Nelson et al., 1997 based on the observation that maximum expression of the Arabidopsis CRT in the anthers coincides with anther degeneration. Moreover, Denecke et al., 1995 reported detection of another plant CRT homolog in the nuclear envelope, in the ER, and in mitotic cells in association with the spindle apparatus and the phragmoplast. Given the interaction of senescence-associated protein with proteins having roles in mitosis, it is possible that the rice CRT of this Example functions in mitotic events. However, Nelson et al, supra, indicate possible additional roles for plant CRT in developmental processes, including a chaperone function that can be reconciled with CRT localization in the developing endosperm, a site characterized by high protein synthesis rates, and in secreting nectaries, which are associated with heavy traffic of secretory proteins through the ER. Note that OsCRTC also interacts with the rice soluble starch synthase homolog OsSSS. Soluble starch synthase enzymes have been isolated from plant endosperm cells (Cao et al., 2000). These data suggest that the rice CRT homolog of this Example can also be found in this tissue, where it is conceivable that it interacts with the soluble starch synthase OsSSS in a chaperone role to promote proper folding of this protein during protein synthesis.

[0473] To further corroborate the notion that the rice senescence-associated protein Os006819-2510 is a membrane-associated protein, a novel interactor identified for this protein is a putative callose synthase catalytic subunit (OsPN23226), another transmembrane enzyme involved in glucan synthesis. Plasma membrane proteins participate in a variety of interactions with the cell wall, including synthesis and assembly of cell wall polymers (Biochemistry and Molecular Biology of Plants, Buchanan, Gruissem and Jones (eds.), John Wiley & Sons, New York, N.Y. 2002, p. 13). The prey protein OsPN23226 likely functions as its Arabidopsis homolog, a plasma membrane enzyme that utilizes UDP-glucose as substrate to synthesize callose for deposition in the cell wall. The interactions of senescence-associated protein with the rice putative callose synthase OsPN23226 and with the calreticulin OsCRTC, and the interaction between OsCRTC and the soluble starch synthase OsSSS all involve membrane-associated proteins. While there is no evidence that such interactions occur at the same time, they can be associated with the traffic that sorts, distributes and targets membrane proteins and other molecules between compartments of the endomembrane system (Biochemistry and Molecular Biology of Plants, Buchanan, Gruissem and Jones (eds.), John Wiley & Sons, New York, N.Y. 2002, p. 14) during the different stages of the cell cycle/development and in response to different physiological and developmental signals. Moreover, the interactions identified in this Example link the senescence-associated bait protein to glucan synthesis, a process that is vital to the plant normal growth. For example, the formation of a functional callose synthase 1 catalytic subunit (CalS1) complex is vital to cell plate formation. Functional characterization of the various components of the CalS1 complex and CalS-associated proteins has been proposed as a means to reveal how the activity of this enzyme is regulated during cell plate formation and to clarify callose synthesis and deposition in plants (Hong et al., Plant Cell 13(4): 755-768, 2001). The interaction identified here between senescence-associated protein and the novel putative callose synthase catalytic subunit (OsPN23226) provides new insight into this process in rice.

[0474] Other interactors identified for senescence-associated protein link this protein to the plant stress response. OsRAB16B is a member of the RAB family of proteins known to be induced by water stress and treatment with the plant hormone abscisic acid. ABA levels increase during seed development in many plant species, stimulating production of seed storage proteins and preventing premature germination; ABA is also induced by water stress and is thought to regulate stomatal transpiration (Raven, Eivert and Eichhorn, p. 684). Based on functional homology with other RAB proteins and on the presence of the ABA-responsive elements in the OsRAB16B promoter, we presume that OsRAB16B has a role in the response to abiotic stress in rice and that its function can be regulated by Ca²⁺. Another interactor correlated with stress is low temperature-induced protein 5 (OsLIP5), which in yeast is involved in lipoic acid metabolism. Lipoic acid in animals has been shown to help minimize the effects of systemic stress (Kelly, 1999) and to provide animal cells with significant protection against the cytotoxic effects of repin, a sesquiterpene lactone isolated from Russian knapweed (Robles et al., 1997). The high similarity (98%) of the rice LIP5-like protein to rice WSI724, a protein encoded by a gene induced by water stress and linked to resistance to chilling in rice, points to similar roles for the OsLIP5 prey protein. Gene expression experiments indicate that the gene encoding OsLIP5 is down-regulated upon treatment with the herbicide BL2. This finding suggests a role for OsLIP5 in the response to abiotic stress. While the specific function of the interactions between Os006819-2510 and the prey proteins OsRAB16B and OsLIP5 is not obvious, these interactions can participate in biological processes related to flower senescence and response to water stress and chilling.

[0475] In addition, the rice calreticulin OsCRTC discussed above can also have a role in the stress response. This hypothesis is based on functional homology with the tobacco CRT protein studied by Denecke et al., 1995 and found to participate in protein-protein interactions in a stress-dependent fashion.

[0476] In summary, among the interactors identified for the rice senescence-associated protein Os006819-2510 are several membrane-associated proteins, which supports the notion that the rice Os006819-2510 is a transmembrane protein. Among the interactors identified are proteins involved in cell cycle processes/mitosis and proteins with functions in the plant stress response. Some are newly characterized rice proteins. The interactions identified for rice senescence-associated protein with proteins involved in cell cycle/development and in resistance to stress suggests an overlapping of roles for the bait protein. Indeed, Os006819-2510 can constitute a link between stress tolerance and processes for cell division in rice.

### Example III

[0477] OsSGT1 is a 367-amino acid protein that includes a tetratricopeptide repeat domain, two variable regions, the CS motif present in metazoan CHORD and SGT1 proteins, and the SGS motif. In yeast, Sgt1 is required for cell-cycle signaling. In yeast, SGT1 associates with the kinetochore complex and the SCF-type E3 ubiquitin ligase by interacting with SKP1. COP9 signalosome interacts with SCF E3 ubiquitin ligases. By its interaction with SCF complexes, SGT1 exerts its essential activity in degrading of SIC1 and CLN1. Thus, one possible role of SGT1 could be to target proteins for degradation by the 26S proteasome via specific SCF complexes or the SGT1 complex can participate in the modification of protein activity or can have a dual role for activation and degradation of the target via ubiquitylation. A. thaliana has two SGT1 homologs. At nonpermissive temperatures AtSGT1a and AtSGT1b can complement G1 and G2 arrest in temperature sensitive sgt1 yeast mutants. However, SGT1b interacts with RAR1 which is required for RPP5 regulated disease resistance to downy mildew. In this scenario, target proteins involved in disease resistance can be targeted for protein degradation by the SGT1 pathway. Barley encodes a SGT1 homolog that also interacts with barley RAR1, which is implicated in disease resistance in barley to downy mildew. (Austin et al., 2002; Azevedo et al., 2002). A BLAST analysis comparing the nucleotide sequence of OsSGT1 against TMRI's GENECHIP® Rice Genome Array sequence database identified probeset OS016424.1 (98%) as the closest match. Gene expression experiments indicated that this gene is up-regulated by the blast infection.

[0478] The rice SGT1 protein shares 74 and 75% amino acid sequence similarity with two Arabidopsis thaliana SGT1 homologs and 45% amino acid sequence similarity with Saccharomyces cerevisiae SGT1. In yeast, SGT1 is required for cell-cycle progression at the G1/S-phase and G2/M-phase transitions. In A. thaliana, SGT1b interacts with Rar1 and mediates disease resistance. Thus, in plants, SGT1 likely controls processes that are fundamental to disease resistance and development. The rice OsSGT1 protein was chosen as a bait for these interaction studies based on its potential relevance to disease resistance and development. One bait fragment encoding amino acid 200-368 of OsSGT1 was used in the yeast two-hybrid screen, as described above.

Results

[0479] The OsSGT1 was found to interact with ten rice proteins. Three interactors have been previously described, namely OsSGT1, a Ras GTPase (gi|730510), and elicitor responsive protein (gi|11358958). The remaining seven interactors are novel proteins with identifiable protein domains, or are similar to other proteins. These are an L-aspartase-like protein, an RNA binding domain protein, an auxin induced-like protein, an archain delta COP-like protein, a fibrillin-like protein, a HSP70-like protein, and a proline rich protein. The elicitor responsive protein was also used as a bait and interacted with 12 novel proteins with identifiable protein domains, with similarity to known proteins or that are unidentifiable by sequence similarity. These were an NAD(P) binding domain protein, a gamma adaptin-like protein, a pectinesterase-like protein, a receptor like kinase protein kinase like protein, a pyruvate orthophosphate dikinase like protein, an lsp-4 like protein, a xanthine dehydrogenase like protein, a ubiquitin specific protease like protein and 4 unknown proteins.

[0480] The interacting proteins of this Example are listed in Tables 6-8, followed by detailed information on each protein and a discussion of the significance of the interactions. The nucleotide and amino acid sequences of the proteins of the Example are provided in SEQ ID NOs: 31-70 and 143-150. Based on the biological function of SGT1, it is possible that the interacting proteins are also involved in cell cycle/mitotic processes and/or in the plant resistance to stress. Likewise, the interactors with the elicitor responsive protein can also be involved in plant resistance to stress. Proteins that participate in cell cycle regulation in rice can be targets for genetic manipulation or for compounds that modify their level or activity, thereby modulating the plant cell cycle. The identification of genes encoding these proteins can allow genetic manipulation of crops or application of compounds to effect agronomically desirable changes in plant development or growth. Likewise, genes that are involved in conferring plants resistance to stress have important commercial applications, as they could be used to facilitate the generation and yield of stress-resistant crops.

TABLE 6

Interacting Proteins Identified for 0s0068 19-2510
(Hypothetical Protein 006819-2510. Similar to
Hemerocallis Senescence-Related Protein 5).

| | | | |
|---|---|---|---|
| | | | Prey |
| | Protein Name | Bait | Coord |
| Gene Name | (GENBANK ® Accession No.) | Coord | (source) |

BAIT PROTEIN

| | | | |
|---|---|---|---|
| PN20285 | OsSGT1 (gi\|6581058) | | |
| (SEQ ID NO: | | | |
| 144) | | | |
| INTERACTORS | | | |
| PN24060 | L-aspartase-like protein-like | 200-368 | 176-315 |
| (SEQ ID NO:32) | | | (output |
| | | | trait) |
| PN20696* | Elicitor responsive protein | 200-368 | 54-144 |
| (OsERP) | (gi\|11358958) | | (input |
| (SEQ ID NO: | | | trait) |
| 146) | | | |
| PN23914 | RNA binding domain protein | 200-368 | 1-263 × 3 |
| (SEQ ID NO:34) | | | (output |
| | | | trait) |
| PN23221# | Proline rich protein | 200-368 | 182-366 × 2 |
| (SEQ ID NO:36) | | | (output |
| | | | trait) |
| | | | 207-344 |
| | | | (input |
| | | | trait) |
| | | | 134-254 |
| | | | (output |
| | | | trait) |
| PN20285 | OsSGT1 (gi\|6581058) | 200-368 | 9-227 |
| (SEQ ID NO: | | | (output |
| 144) | | | trait) |
| PN24061 | Auxin induced protein-like | 200-368 | 34-236 |
| (SEQ ID NO:38) | | | (output |
| | | | trait) |
| PN24063 | RAS GTPase (gi\|730510) | 200-368 | 63-202 |
| (SEQ ID NO: | | | (output |
| 148) | | | trait) |
| PN23949 | HSP70-like | 200-368 | 244-418 |
| (SEQ ID NO:40) | | | (output |
| | | | trait) |
| PN28982 | Archain delta COP-like | | |
| (SEQ ID NO:42) | | | |
| PN29042 | Fibrillin-like | | |
| (SEQ ID NO:44) | | | |

*Additional interactions identified for elicitor responsive protein are shown in TABLE 7
#Additional interactions identified for PN23221 are shown in TABLE 8

[0481] The names of the clones of the proteins used as baits and found as preys are given. Nucleotide/protein sequence accession numbers for the proteins of the Example (or related proteins) are shown in parentheses under the protein name. The bait and prey coordinates (Coord) are the amino acids encoded by the bait fragment(s) used in the search and by the interacting prey clone(s), respectively. The source is the library from which each prey clone was retrieved.

TABLE 7

| | | | |
|---|---|---|---|
| | | | Prey |
| | Protein Name | Bait | Coord |
| Gene Name | (GENBANK ® Accession No.) | Coord | (source) |

BAIT PROTEIN

| | | | |
|---|---|---|---|
| PN20696 | Elicitor responsive | | |
| (OsERP) | protein (gi\|11358958) | | |
| (SEQ ID NO: | | | |
| 146) | | | |
| INTERACTORS | | | |
| PN29984 | Novel Protein | 50-145 | 1-38 |
| (SEQ ID NO:46) | PN29984 | | 5-41 |
| | | | (input |
| | | | trait) |
| PN30844 | Novel protein | 50-145 | 1-64 |
| (SEQ ID NO:48) | PN30844 | | (input |
| | | | trait) |
| PN30868 | NAD(P) binding | 50-145 | 167-336 |
| (SEQ ID NO:50) | domain protein | | (input |
| | | | trait) |
| PN24292 | Gamma adaptin-like | 23-120 | 737-918 |
| (SEQ ID NO:52) | | | (output) |
| PN29983 | Novel protein | 50-145 | 1-131 |
| (SEQ ID NO:54) | PN29983 | | (input |
| | | | trait) |
| PN30845 | Pectinesterase-like | 50-145 | 1-64 |
| (SEQ ID NO:56) | | | (input |
| | | | trait) |
| PN31085 | Receptor-like protein | 23-120 | 378-553 |
| (SEQ ID NO:58) | kinase-like | | (output |
| | | | trait) |
| PN20674 | Pyruvate | 50-145 | 64-263 |
| (SEQ ID NO:60) | orthophosphate | | 71-298 |
| | dikinase-like | | (input |
| | | | trait) |
| PN30870 | Isp-4 like | 50-145 | 1-446 |
| (SEQ ID NO:62) | | | (input |
| | | | trait) |
| PN29997 | Xanthine | 23-120 | 737/918 |
| (SEQ ID NO:64) | dehydrogenase-like | | (output |
| | | | trait) |
| PN30843 | Ubiquitin specific | 50-145 | 164-221 |
| (SEQ ID NO:66) | protease-like | | (input |
| | | | trait) |
| PN30857 | Novel protein | 50-145 | 1-148 |
| (SEQ ID NO:68) | PN30857 | | (input |
| | | | trait) |

[0482] TABLE 8

| | | | |
|---|---|---|---|
| | | | Prey |
| | Protein Name | Bait | Coord |
| Gene Name | (GENBANK ® Accession No.) | Coord | (source) |

PREY PROTEIN

| | | | |
|---|---|---|---|
| PN23221 | Proline rich protein | | |
| (SEQ ID NO:36) | | | |
| BAIT PROTEIN | | | |
| PN20621 | Shaggy kinase | 120-435 | 175-311 |
| (SEQ ID NO: | (gi\|13677093) | | (output |
| 150) | | | trait) |
| PN20115 | Ring zinc finger protein | 5-140 | 84-302 |
| (SEQ ID NO:70) | | | 191-324 |
| | | | (output |
| | | | trait) |

Yeast Two-Hyrid Using OsSGT1 as Bait

[0483] The bait fragment encoding amino acid 200-368 of OsSGT1 was found to interact with L-aspartase-like protein PN24060. A BLAST analysis of the amino acid sequence of PN24060 indicated that this prey protein has 36.5% similarity to A. thaliana L-aspartase (gi|18394135). The enzyme L-aspartate ammonia-lyase (aspartase) catalyzes the reversible deamination of the amino acid L-aspartic acid, using a carbanion mechanism to produce fumaric acid and ammonium ion. While the catalytic activity of this enzyme has been known for nearly 100 years, a number of recent studies have revealed some interesting and unexpected new properties of this reasonably well-characterized enzyme. The non-linear kinetics that are seen under certain conditions have been shown to be caused by the presence of a separate regulatory site. The substrate, aspartic acid, can also play the role of an activator, binding at this site along with a required divalent metal ion. So it is possible that PN24060 catalyses a reaction that pertains to protein modification and the modification can be important for disease resistance or cell cycling.

[0484] The bait fragment encoding amino acid 200-368 of OsSGT1 was also found to interact with elicitor responsive protein, PN20696. A BLAST analysis of the amino acid sequence of the prey clone PN20696 indicated that this protein is the rice elicitor responsive protein (gi|11358958; OsERP). OsERP is a 144-amino acid protein that, according to GENBANK®, is expressed by rice culture cells in the presence of the rice blast fungal elicitor. Thus, OsERP can have a role in disease responses in rice.

[0485] OsERP was also used as bait and found to interact with 12 other proteins (see Table 7). These prey are described in this Example below.

[0486] An A. thaliana homologue to OsERP was identified by BLAST. At1g63220 shares 75% amino acid similarity with OsERP. To see if Arabidopsis homologues of OsERP have roles in disease resistance, Arabidopsis thaliana with T-DNA insertions in At1g63220 (line SAIL_{—}320_D02) was identified from a random insertion seed library. DNA regions surrounding the insertions were sequenced and revealed that the T-DNAs were located within exon 5 of At1g63220. Plants were backcrossed and plants homozygous for the T-DNA insertion were identified by PCR. Homozygous mutants and wild type plants were challenged with Pseudomonas syringae pv. maculicola ES4326 and plants were assayed for amount of P. syringae bacteria accumulation 3 days post inoculation (Glazebrook et al., 1996) These experiments were repeated twice on at least six plants. Data are reported as means and standard deviations of the log of colony forming units per leaf cm². By three days after inoculation, the mutant plants accumulated more than 10 times as much bacteria as wild type plants (wt=3.94 log cfu/leaf disk std. 0.57, at1g63220=5.34 std. 0.63). Hence, At1g63220 contributes to disease resistance in A. thaliana. It is possible that the At1g63220 mutation inhibits defense responses that are dependent upon SGT1 interactions.

[0487] In addition, the bait fragment encoding amino acid 200-368 of OsSGT1 was found to interact with RNA-binding domain protein, PN23914. PN23914 is a 164-amino acid protein. A BLAST analysis of the amino acid sequence of this prey shows it has 35.9% sequence identity to tFZR1 from Oncorhynchus mykiss (gi|2982698). TFZR1 is an orphan nuclear receptor family member, tFZR1, which has a FTZ-F1 box. The amino acid sequences of the zinc finger domain and the FTZ-F1 box has 92.8% and 100% identity, respectively, with those of zebrafish FTZ-F1. On the other hand, the overall homology between tFZR1 and zebrafish FTZ-F1 is low (33.0%). The results indicate that tFZR1 is a new member of fushitarazu factor 1 (FTZ-F1) subfamily. It is possible that PN23914 shares functionality through the zing finger domain.

[0488] In addition, bait fragment encoding amino acid 200-368 of OsSGT1 was found to interact with proline rich protein, PN23221. A BLAST analysis of the amino acid sequence of PN23221 indicated that this prey protein is 40.3% similar to a rice repetitive proline rich protein (gi|18478606). Proline rich proteins can mediate interaction among proteins (Zhao et al., 2001). Note that proline rich protein PN23221 also interacts with shaggy kinase PN20621 and ring zinc finger protein-like PN20115 (see Table 28). Thus, the proline rich protein PN23221 can serve to bring these proteins together with OsSGT1.

[0489] The bait fragment encoding amino acid 200-368 of OsSGT1 was also found to interact with OsSGT1. In other words, OsSGT1 interacts with itself. Although the bait for OsSGT1 included amino acids 200-368, the prey included amino acids 9-227. Although OsSGT1 can be a self-regulator through aggregation, these bait and prey domains can reflect natural protein folding of a single native OsSGT1 protein.

[0490] Additionally, the bait fragment encoding amino acid 200-368 of OsSGT1 was found to interact with an auxin-induced protein like protein, PN24061. A BLAST analysis against the public database indicated that PN24061 is 63.5% similar to a rice putative IAA1 protein (gi|17154533). Indole acetic acid is a plant growth hormone and is classified as an auxin. IAA is associated with a variety of physiological processes, including apical dominance, tropisms, shoot elongation, induction of cambial cell division and root initiation. Thus, genes that are induced by IAA likely produce proteins that are responding developmental changes. This associated goes hand in hand with regulation of cell division by interaction with SGT1.

[0491] The bait fragment encoding amino acid 200-368 of OsSGT1 was also found to interact with Ras GTPase, PN24063. A BLAST analysis of the amino acid sequence of PN24063 determined that this protein is ras-related GTP binding protein possessing GTPase activity (gi|730510). This protein has four conserved regions involved in GTP binding and hydrolysis which are characteristic in the ras and ras-related small GTP-binding protein genes. In addition, two consecutive cysteine residues near the carboxyl-terminal end required for membrane anchoring are also present. This protein synthesized in Escherichia coli possessed GTPase activity (i.e., hydrolysis of GTP to GDP; Kidou et al., 1993). Ras GTPases are likely involved in signaling processes for development. ORFX from tomato that is expressed early in floral development, controls carpel cell number, and has a sequence suggesting structural similarity to the human oncogene c-H-ras p21 (fw2.2: a quantitative trait locus key to the evolution of tomato fruit size. (Frary et al., 2000). The Rho family of GTPases are also involved in control of cell morphology, and are also thought to mediate signals from cell membrane receptors (Winge et al., 1997).

[0492] An A. thaliana homologue to PN24063 was identified by BLAST. At1g02130 shares 90% amino acid similarity with PN24063. To see if Arabidopsis homologues of PN24063 have roles in disease resistance Arabidopsis thaliana with T-DNA insertions in At1g02130 (line SAIL_{—}680_D03) was identified from a random insertion seed library. DNA regions surrounding the insertions were sequenced and revealed that the T-DNAs were located within the promoter of At1g02130. Plants were backcrossed and plants homozygous for the T-DNA insertion were identified by PCR. Homozygous mutants and wild type plants were challenged with Pseudomonas syringae pv. maculicola ES4326 and plants were assayed for amount of P. syringae bacteria accumulation 3 days post inoculation (Glazebrook et al., supra). These experiments were repeated twice on at least six plants. Data are reported as means and standard deviations of the log of colony forming units per leaf cm². By three days after inoculation, the mutant plants accumulated more than 10 times as much bacteria as wild type plants (wt=3.93 log cfu/leaf disk std. 0.57, at1g02130=5.22 std. 0.9). Hence, At1g02130 contributes to disease resistance in A. thaliana. It is possible that the At1g02130 mutation inhibits defense responses that are dependent upon SGT1 interactions.

[0493] The bait fragment encoding amino acid 200-368 of OsSGT1 was found to interact with Archain delta COP, PN28982. A BLAST analysis of the amino acid sequence of PN28982 indicated that this prey protein is 92% similar to rice archain delta COP (gi|2506139). Cytosolic coat proteins that bind reversibly to membranes have a central function in membrane transport within the secretory pathway. One well-studied example is COPI or coatomer, a heptameric protein complex that is recruited to membranes by the GTP-binding protein Arf1. Assembly into an electron-dense coat then helps in budding off membrane to be transported between the endoplasmic reticulum (ER) and Golgi apparatus. Activated Arf1 brings coatomer to membranes. However, once associated with membranes, Arf1 and coatomer have different residence times: coatomer remains on membranes after Arf1-GTP has been hydrolysed and dissociated. Rapid membrane binding and dissociation of coatomer and Arf1 occur stochastically, even without vesicle budding. This continuous activity of coatomer and Arf1 generates kinetically stable membrane domains that are connected to the formation of COPI-containing transport intermediates. This role for Arf1/coatomer might provide a model for investigating the behaviour of other coat protein systems within cells. (Presley et al., 2002). It is possible that this delta COP interacts with the OsSGT1 and a Ras GTPase to coordinate membrane transport for proteolytically processed proteins.

[0494] An A. thaliana homologue to PN28982 was identified by BLAST. At5g05010 shares 77% amino acid similarity with PN28982. To see if Arabidopsis homologues of PN28982 have roles in disease resistance Arabidopsis thaliana with T-DNA insertions in At5g05010 (line SAIL_{—}84_C10) was identified from a random insertion seed library. DNA regions surrounding the insertions were sequenced and revealed that the T-DNAs were located within the promoter of At5g05010. Plants were backcrossed and plants homozygous for the T-DNA insertion were identified by PCR. Homozygous mutants and wild type plants were challenged with Pseudomonas syringae pv. maculicola ES4326 and plants were assayed for amount of P. syringae bacteria accumulation 3 days post inoculation (Glazebrook et al., supra). These experiments were repeated twice on at least six plants. Data are reported as means and standard deviations of the log of colony forming units per leaf cm². By three days after inoculation, the mutant plants accumulated more than 10 times as much bacteria as wild type plants (wt=3.93 log cfu/leaf disk std. 0.57, at5g05010=5.24 std. 0.52). Hence, At5g05010 contributes to disease resistance in A. thaliana. It is possible that the At5g05010 mutation inhibits defense responses that are dependent upon SGT1 interactions.

[0495] The bait fragment encoding amino acid 200-368 of OsSGT1 was found to interact with fibrillin-like protein, PN29042. A BLAST analysis of the amino acid sequence of OsPN29037 indicated that this prey protein is 75% similar to the potato fibrillin homolog CDSP34 precursor from chloroplasts (gi|7489242). Plastid lipid-associated proteins, also termed fibrillin/CDSP34 proteins, are known to accumulate in fibrillar-type chromoplasts such as those of ripening pepper fruit, and in leaf chloroplasts from Solanaceae plants under abiotic stress conditions. Further, substantially increased levels of fibrillin/CDSP34 proteins are shown in various dicotyledonous and monocotyledonous plants in response to water deficit. (Langenkamper et al., 2001) In water-stressed tomato plants, similar increases in the CDSP 34-related transcript amount were noticed in wild-type and ABA-deficient flacca mutant, but protein accumulation was observed only in wild-type, suggesting a posttranscriptional role of ABA in CDSP 34 synthesis regulation. Substantial increases in CDSP 34 transcript and protein abundances were also observed in potato plants subjected to high illumination. The CDSP 34 protein is proposed to play a structural role in stabilizing stromal lamellae thylakoids upon osmotic or oxidative stress. (Gillet et al., 1998).

[0496] A BLAST analysis comparing the nucleotide sequence of PN29042 against TMRI's GENECHIP® Rice Genome Array sequence database identified probeset OS011738 (100%) as the closest match. Gene expression experiments indicated that this gene is up-regulated by ABA treatment.

[0497] An A. thaliana homologue to PN29042 was identified by BLAST. At4g22240 shares 79% amino acid similarity with PN29042. To see if Arabidopsis homologues of PN29042 have roles in disease resistance Arabidopsis thaliana with T-DNA insertions in At4g22240 (line SAIL_{—}691_B11) was identified from a random insertion seed library. DNA regions surrounding the insertions were sequenced and revealed that the T-DNAs were located within exon 1 of At4g22240. Plants were backcrossed and plants homozygous for the T-DNA insertion were identified by PCR. Homozygous mutants and wild type plants were challenged with Pseudomonas syringae pv. maculicola ES4326 and plants were assayed for amount of P. syringae bacteria accumulation 3 days post inoculation (Glazebrook et al., supra). These experiments were repeated twice on at least six plants. Data are reported as means and standard deviations of the log of colony forming units per leaf cm². By three days after inoculation, the mutant plants accumulated more than 10 times as much bacteria as wild type plants (wt=3.93 log cfu/leaf disk std. 0.57, at4g22240=5.21 std. 0.43). Hence, At4g22240 contributes to disease resistance in A. thaliana. It is possible that the At4g22240 mutation inhibits defense responses that are dependent upon SGT1 interactions.

[0498] Additionally, the bait fragment encoding amino acid 200-368 of OsSGT1 was found to interact with HSP70-like protein, PN23949. A BLAST analysis of the amino acid sequence of OsPN3949 indicated that this prey protein is 71% similar to the cucumber 70K heat shock protein found in chloroplasts (gi|7441856). Heat shock proteins (reviewed in Bierkens et al., 2000) are stress proteins that function as intracellular chaperones to facilitate protein folding/unfolding and assembly/disassembly. They are selectively expressed in plant cells in response to a range of stimuli, including heat and a variety of chemicals. As regulators, HSP proteins are thus part of the plant protective stress response. A BLAST analysis comparing the nucleotide sequence of PN23949 against TMRI's GENECHIP® Rice Genome Array sequence database identified probeset OS015016 (97%) as the closest match. Gene expression experiments indicated that this gene is down-regulated by herbicide and JA treatment.

Yeast Two-Hybrid Using OsERP (PN20696) as Bait

[0499] Next, one of the proteins found to interact with OsSGT1, namely the elicitor responsive protein PN20696 (gi|11358958; OsERP), was used as a bait. As shown in Table 27, the rice elicitor responsive protein PN20696 (gi|11358958; OsERP) was found to interact with a receptor-like protein kinase like protein, PN31085. A BLAST analysis of the amino acid sequence of OsPN31085 indicated that this prey protein is 48% similar to a rice receptor like protein kinase (gi|7434420). The receptor protein kinases include a large group of proteins and most contain a cytoplasmic protein kinase catalytic domain, a transmembrane region, and and/or an extracellular domain consisting of leucine-rich repeats, which are thought to interact with other macromolecules. Cell to cell communication is likely mediated by receptor kinases which have important roles in plant morphogenesis.

[0500] OsERP was also found to interact with pyruvate orthophosphate dikinase, PN20674. A BLAST analysis of the amino acid sequence of PN20674 indicates that this prey protein is 97% similar to rice pyruvate orthophosphate dikinase (gi|743444). Pyruvate orthophosphate dikinase (PPDK) is known for its role in C4 photosynthesis but has no established function in C3 plants. Abscisic acid, PEG and submergence were found to markedly induce a protein of about 97 kDa, identified by microsequencing as PPDK, in rice roots (C3). One rice PPDK is ABA-induced protein from roots. Western blot analysis showed a PPDK induction in roots of rice seedlings during gradual drying, cold, high salt and mannitol treatment, indicating a water deficit response. PPDK was also induced in the roots and sheath of submerged rice seedlings, and in etiolated rice seedlings exposed to an oxygen-free N2 atmosphere, which indicated a low-oxygen stress response. None of the stress treatments induced PPDK protein accumulation in the lamina of green rice seedlings. Ppdk transcripts were found to accumulate in roots of submerged seedlings, concomitant with the induction of alcohol dehydrogenase 1. Low-oxygen stress triggered an increase in PPDK activity in roots and etiolated rice seedlings, accompanied by increases in phosphoenolpyruvate carboxylase and malate dehydrogenase activities. The results indicate that cytosolic PPDK is involved in a metabolic response to water deficit and low-oxygen stress in rice, an anoxia-tolerant species (Moons et al., 1998).

[0501] Additionally, OsERP was found to interact with gamma adaptin, PN24292.

[0502] A BLAST analysis of the amino acid sequence of PN24292 indicated that this prey protein is 97% similar to the Arabidopsis gamma adaptin (gi|5091510). Eukaryotic vesicular transport requires the recognition of membranes through specific protein complexes. The heterotetrameric adaptor protein complexes 1, 2, and 3 (AP1/2/3) are composed of two large, one small, and one medium adaptin subunit. Large subunits of AP1/2/3 are homologous and two subunits of the heptameric coatomer I (COPI) complex belong to this gene family. In addition, all small subunits and the aminoterminal domain of the medium subunits of the heterotetramers are homologous to each other; this also holds for two corresponding subunits of the COPI complex. AP1/2/3 and a substructure (heterotetrameric, F-COPI subcomplex) of the heptameric COPI have a common ancestral complex (called pre-F-COPI). Since all large and all small/medium subunits share sequence similarity, the ancestor of this complex is inferred to have been a heterodimer composed of one large and one small subunit. (Schledzewski et al., 1999). An archain delta COP interacts with OsSGT1 which interacts with the Gamma adaptin bait ERP.

[0503] OsERP was also found to interact with xanthine dehydrogenase, PN29997. A BLAST analysis of the amino acid sequence of PN29997 indicated that this prey protein is 66% similar to the Arabidopsis xanthine dehydrogenase (gi|15236216). Xanthine dehydrogenase is the enzyme responsible for xanthine degradation. Xanthine dehydrogenase is involved in purine catabolism and stress reactions. A BLAST analysis comparing the nucleotide sequence of PN29997 against TMRI's GENECHIP® Rice Genome Array sequence database identified probeset OS013724 (100%) as the closest match. Gene expression experiments indicated that this gene is expressed in seeds.

[0504] OsERP was also found to interact with ubiquitin specific protease, PN30843. A BLAST analysis of the amino acid sequence of PN30843 indicated that this prey protein is 40% similar to an Arabidopsis ubiquitin specific protease (gi|11993486). The ubiquitin/26S proteasome pathway is a major route for selectively degrading cytoplasmic and nuclear proteins in eukaryotes. In this pathway, chains of ubiquitins become attached to short-lived proteins, signaling recognition and breakdown of the modified protein by the 26S proteasome. During or following target degradation, the attached multi-ubiquitin chains are released and subsequently disassembled by ubiquitin-specific proteases (UBPs) to regenerate free ubiquitin monomers for re-use. T-DNA insertion mutations in an Arabidopsis ubiquitin protease cause an embryonic lethal phenotype, with the homozygous embryos arresting at the globular stage. The arrested seeds have substantially increased levels of multi-ubiquitin chains, indicative of a defect in ubiquitin recycling. Thus, there is essential role for the ubiquitin/26S proteasome pathway in general and for AtUBP14 in particular during early plant development (Doelling et al., Plant J. 27(5): 393-405, 2001). SGT1 also interacts with components of the ubiquitin/26S proteasome pathway and the ERP that interacts with this ubiquitin specific protease interacts with OsSGT. This protease can be have roles in disease resistance as well as development.

[0505] OsERP was also found to interact with pectinesterase, PN30845. A BLAST analysis of the amino acid sequence of PN30845 indicated that this prey protein is 71% similar to a rice pectinesterase (gi|15528783). Pectinesterases catalyse the esterification of cell wall polygalacturonans. In dicot plants, these ubiquitous cell wall enzymes are involved in important developmental processes including cellular adhesion and stem elongation. A BLAST analysis comparing the nucleotide sequence of PN30845 against TMRI's GENECHIP® Rice Genome Array sequence database identified probeset OS007057 (99%) as the closest match. Gene expression experiments indicated that this gene is up-regulated as a result of JA treatment, high saline growth conditions and herbicide treatment.

[0506] OsERP was also found to interact with several proteins, namely PN30870, PN29984, PN30844, PN29983, PN30868 and PN30857. A BLAST analysis of the amino acid sequence of PN30870, PN29984, PN30844, PN29983, PN30868 and PN30857 indicates that these prey proteins have no sufficient homology to any other characterized proteins. However, based on association with the rice elicitor responsive protein PN20696, these proteins can have roles in disease resistance or cell cycling.

[0507] A BLAST analysis comparing the nucleotide sequence of PN30857 against TMRI's GENECHIP® Rice Genome Array sequence database identified probeset OS008661.1 (99%) as the closest match. Gene expression experiments indicated that this gene is up-regulated as a result of blast infection.

[0508] An A. thaliana homologue to PN29983 was identified by BLAST. At2g36950 shares 52% amino acid similarity with PN29983. To see if Arabidopsis homologues of PN29983 have roles in disease resistance, Arabidopsis thaliana with T-DNA insertions in At2g36950 (line SAIL_{—}779_E11) was identified from a random insertion seed library. DNA regions surrounding the insertions were sequenced and revealed that the T-DNAs were located within exon 3 of At2g36950. Plants were backcrossed and plants homozygous for the T-DNA insertion were identified by PCR. Homozygous mutants and wild type plants were challenged with Pseudomonas syringae pv. maculicola ES4326 and plants were assayed for amount of P. syringae bacteria accumulation 3 days post inoculation (Glazebrook et al., supra). These experiments were repeated twice on at least six plants. Data are reported as means and standard deviations of the log of colony forming units per leaf cm². By three days after inoculation, the mutant plants accumulated more than 10 times as much bacteria as wild type plants (wt=3.94 log cfu/leaf disk std. 0.57, at2g36950=5.95 std. 0.72). Hence, At2g36950 contributes to disease resistance in A. thaliana. It is possible that the At2g36950 mutation inhibits defense responses that are dependent upon ERP/SGT1 interactions.

[0509] It should be noted that the all of the following bait proteins, namely OsSGT, ring zinc finger, PN20115, and shaggy kinase, PN20621, identified proline rich protein, PN23221, as their prey. OsSGT and PN23221 have been described earlier in this Example.

[0510] A BLAST analysis of the amino acid sequence of ring zinc finger PN20115 indicated that this bait protein is 65% similar to A. thaliana ring zinc finger protein At1g63170. The RING domain is a conserved zinc finger motif, which serves as a protein-protein interaction interface. This protein can interact with other proteins to control developmental or stress tolerance processes. A BLAST analysis comparing the nucleotide sequence of PN20115 against TMRI's GENECHIP® Rice Genome Array sequence database identified probeset OS015830 (90%) as the closest match. Gene expression experiments indicated that this gene is up-regulated as a result of conditions of drought.

[0511] A BLAST analysis of the amino acid sequence of shaggy kinase PN20621 indicated that this bait protein is the rice shaggy kinase (gi|131677093). GSK3/SHAGGY is a highly conserved serine/threonine kinase implicated in many signaling pathways in eukaryotes. Many GSK3/SHAGGY-like kinases have been identified in plants. The Arabidopsis BRASSINOSTEROID-INSENSITIVE 2 (BIN2) gene encodes a GSK3/SHAGGY-like kinase. Gain-of-function mutations within its coding sequence or its overexpression inhibit brassinosteroid (BR) signaling, resulting in plants that resemble BR-deficient and BR-response mutants. In contrast, reduced BIN2 expression via cosuppression partially rescues a weak BR-signaling mutation. Thus, BIN2 acts as a negative regulator to control steroid signaling in plants (Li and Nam, Science 295(5558): 1299-1301, 2002).

Summary

[0512] As one of the major human staples, rice has been a target of genetic engineering for higher yields and resistance to diseases, pests, and environmental stresses of various kinds. The proteins identified in the present Example have presumed roles in cell cycle processes and/or the stress response. Knowledge of the proteins and molecular interactions associated with cell cycle processes and stress response in rice could lead to important applications in agriculture. Modulation of these interactions can be exploited to effect changes in plant development or growth that would result in increased crop yield and tolerance to environmental stress conditions.

[0513] Plant disease response often mimics certain normal developmental processes. For example, plants responses to fungal gibberellic acid and fusicoccin toxin are similar to responses to plant-produced gibberellin and auxin, respectively (Hedden and Kamiya, Annual Rev. Plant Physiol. Plant Mol. Biol. 48: 431, 1977; Baunsgaard et al., Plant J. 13: 661, 1998). The same can be said for abiotic stress responses and certain stages of plant development. Leaf cells undergoing dehydration stress express some of the same genes that embryonic cells express during development or seed desiccation (Medina et al., Plant Physiol. 125: 1655, 2001). Since systematic regulation of gene expression drives developmental processes and stress responses (Chen et al., Plant Cell 14: 559, 2002) it is likely that there is a broader overlapping set of genes and their cognate proteins involved in such responses. This Example describes one such overlapping set of genes.

[0514] The results described in this Example are useful for predicting gene function in rice or other plants. For example, rice has a homolog (OsSGT1; gb|AAF18438) to the barley SGT1 and A. thaliana SGT1b proteins that participate in pathogen defense through interactions with resistance gene and ubiquitinylation protein degradation pathways. OsSGT1 is inducible by blast infection and likely participates in pathogen defense. OsSGT1 interacted with several undefined and known proteins, including one whose transcript is induced upon treatment with a rice blast fungal elicitor (gb|AF090698). The elicitor-responsive protein (OsERP) interacted with other undefined proteins and an ubiquitin protease-related protein, which implicates OsERP in SGT1 mediated protein degradation. These rice proteins, as well as other plant homologs, are suspected to have associated roles in disease resistance.

[0515] A. thaliana proteins homologous to OsERP(PN20696), Ras GTPase (PN24063), Archain delta COP-like (28982), fibrillin-like (PN29042) and to one of the undefined proteins that interacted with OsERP(PN29983) have also been identified. A. thaliana homozygous for insertion mutations in the cognate genes were challenged with Pseudomonas syringae. By three days after inoculation, the mutant plants accumulated more than 10 times as many bacteria as wild type plants. Hence, these Arabidopsis homologs contribute to disease resistance in A. thaliana. It is possible that these mutations inhibit defense responses that are dependent upon SGT1 interactions. Based upon homology and the interaction map, the rice homologs from which are associated the Arabidopsis genes can also involved in disease resistance and other processes utilizing SGT1 as a factor. These results demonstrate that the combined datasets can be used to predict gene functions that can be verified using phenotypes of mutants.

### Example IV

[0516] This Example describes the identification and characterization of rice proteins that interact at the cell wall in response to biotic stress. As has been described above, an automated, high-throughput yeast two-hybrid assay technology was used to identify proteins interacting with rice chitinase, class III, and with cellulose synthase catalytic subunit. The sequences encoding the protein fragments used in the search were then compared by BLAST analysis against proprietary and public databases to determine the sequences of the full-length genes. The proteins found appear to be localized or targeted to the cell wall and to participate in the plant pathogen-induced defense response. The identification and characterization of proteins participating in pathways and biochemical reactions associated with defense against pathogens in rice can allow the development of genetically modified crops with enhanced or reduced disease resistance.

[0517] Chitinases are glycohydrolases that degrade chitin, a structural component of insects and plant pathogens such as nematodes, fungi, and bacteria. These enzymes are involved in multiple biological functions that include defense against chitin-containing pathogens, with class III chitinases having a substrate specificity for bacterial cell walls (Brunner et al., Plant J. 14(2): 225-34, 1998). Chitinase was chosen as a bait for these interaction studies based on its relevance to TMRI's plant health programs. The high potential for specific enzyme-substrate interactions makes these proteins suitable for two-hybrid assays. The identification of rice genes encoding proteins involved in the plant response to pathogens are important to agriculture, as their discovery can allow genetic manipulation of crops to obtain plants with enhanced or reduced disease resistance.

[0518] The second bait used in this Example, namely cellulose synthase catalytic subunit, is part of a membrane-bound enzyme complex involved in the synthesis of cellulose, an essential component of the cell wall of higher plants whose production is central to morphogenesis and many other biological processes in plants (reviewed in Perrin R. M., Curr. Biol. 11(6): R213-R216, 2001).

[0519] This example provides newly characterized rice proteins interacting with a rice chitinase, class III (OsCHIB1), and with rice cellulose synthase catalytic subunit, RSW1-like (OsCS). An automated, high-throughput yeast two-hybrid assay technology (provided by Myriad Genetics Inc., Salt Lake City, Utah) was used to search for protein interactions with the chitinase and cellulose synthase bait proteins.

Results

[0520] Chitinase, class III, was found to interact with rice catalase A, an antioxidant enzyme that is part of the plant's detoxification mechanism against molecules induced in response to environmental stresses. A second interactor, cellulose synthase catalytic subunit, is an enzyme involved in cellulose biosynthesis and is the second bait protein of this Example. The search also identified four novel rice proteins interacting with chitinase: a protein similar to plant ABC transporter proteins, which play an important role in defense responses by eliminating toxins from tissues; a peptidase similar to Arabidopsis thaliana glutamyl aminopeptidase, whose proteolitic activity can be associated with activation of signaling molecules during the response of the plant to pathogens; a protein similar to a putative ATPase from A. thaliana, and one unknown protein, similar to a putative protein from A. thaliana.

[0521] The cellulose synthase catalytic subunit bait clone was found to interact with itself and with twelve proteins. These include three known rice proteins: the DNAJ homologue, a type of molecule known to participate in the plant protective stress response as a regulator of heat shock proteins, and two proteins that function as membrane-spanning pumps: the product of the salT gene, which is induced by salt and stress, and the channel protein aquaporin. Nine interactors are novel proteins: a DNA-damage inducible-like protein with a putative role in the plant defense mechanism against nucleic acid damage; a putative BAG protein which presumably participates in the plant stress response by regulating heat shock proteins; a protein similar to the riboflavin precursor 6,7-dimethyl-8-ribityllumazine synthase precursor from A. thaliana and possibly involved in biosynthesis of riboflavin during oxidative stress; a protein similar to soybean calcium-dependent protein kinase and one similar to A. thaliana putative zinc finger protein, with likely roles as mediators of molecular signaling or transcription following damage to the cell wall; and four proteins of unknown function.

[0522] The interacting proteins of the Example are listed in Table 9 and Table 10 below, followed by detailed information on each protein and a discussion of the significance of the interactions. A diagram of the interactions is provided in FIG. 2. The nucleotide and amino acid sequences of the proteins of the Example are provided in SEQ ID NOs: 71-96 and 151-162.

[0523] Some of the proteins identified represent rice proteins previously uncharacterized. These proteins appear to participate in the plant defense mechanism against pathogens. Based on their presumed biological function and on their ability to specifically interact with the chitinase and cellulose synthase bait proteins, the interacting proteins can be localized or targeted to the cell wall, where they are involved in biochemical reactions and gene induction associated with local or systemic defense against pathogens.

TABLE 9

Interacting Proteins Identified for OsCHIB1
(Chitinase, Class III).

| | | | |
|---|---|---|---|
| | | | Prey |
| | Protein Name | Bait | Coord |
| Gene Name | (GENBANK ® Accession No.) | Coord | (source) |

BAIT PROTEIN

| | | | |
|---|---|---|---|
| OsCHIB1 | O. sativa Chitinase, Class III | | |
| PN19651 | (AF296279; AAG02504) | | |
| (SEQ ID NO: | | | |
| 152) | | | |
| INTERACTORS | | | |
| OsCATA | O. sativa Catalase A | 10-200 | 332-433 |
| PN20899 | Isozyme | | (input |
| (SEQ ID NO: | (D29966; BAA06232) | | trait) |
| 154) | | | |
| OsCS* | O. sativa Cellulose | 10-200 | 411-489 |
| PN19707 | Synthase Catalytic Subunit, | | (input |
| (SEQ ID NO: | RSW1-Like | | trait) |
| 156) | (AF030052; AAC39333) | | |
| OsPN22823 | Novel Protein PN22823, | 10-200 | 25-106 |
| (SEQ ID NO:72) | Similar to ABC Transporter | | (input |
| | Proteins | | trait) |
| | (T02187, AB043999.1, | | |
| | NP_171753; e = 0) | | |
| OsPN22154 | Novel Protein PN22154, | 10-200 | 390-562 |
| (SEQ ID NO:74) | Similar to A. thaliana | | (input |
| | Glutamyl Aminopeptidase | | trait) |
| | (AL035525; e = 0) | | |
| OsPN29041 | Novel Protein PN29041, | 10-200 | 2 × 5-108 |
| (SEQ ID NO:76) | Fragment, Similar to A. | | (input |
| | thaliana Putative ATPase | | trait) |
| | (AAG52137; e⁻¹⁷) | | |
| OsPN22020 | Novel Protein PN22020, | 10-200 | 3 × 76-170 |
| (FL_R01_005_C09. | Fragment, Similar to A. | | 128-170 |
| g.1a.Sp6a) | thaliana Putative Protein | | (input |
| (SEQ ID NO:78) | (NP_197783; 3e⁻³⁴) | | trait) |

*The cellulose synthase catalytic subunit was also used as a bait; its interactions are shown in TABLE 10.

[0524] The names of the clones of the proteins used as baits and found as preys are given. Nucleotide/protein sequence accession numbers for the proteins of the Example (or related proteins) are shown in parentheses under the protein name. The bait and prey coordinates (Coord) are the amino acids encoded by the bait fragment(s) used in the search and by the interacting prey clone(s), respectively. The source is the library from which each prey clone was retrieved.

TABLE 10

Interacting Proteins Identified for OsCS
(Cellulose Svnthase Catalytic Subunit,
RSW1-Like)

| | | | |
|---|---|---|---|
| | | | Prey |
| | Protein Name | Bait | Coord |
| Gene Name | (GENBANK ® Accession No.) | Coord | (Source) |

BAIT PROTEIN

| | | | |
|---|---|---|---|
| OsCS | O. sativa Cellulose Synthase | | |
| PN19707 | Catalytic Subunit, RSW1-Like | | |
| (SEQ ID NO: | (AF030052; AAC39333) | | |
| 156) | | | |
| INTERACTORS | | | |
| OsCS | O. sativa Cellulose Synthase | 316-583 | 316-582 |
| PN19707 | Catalytic Subunit, RSW1-Like | | (input |
| (SEQ ID NO: | (AF030052; AAC39333) | | trait) |
| 156) | | | |
| OsAAB53810 | O. sativa salT Gene Product | 316-583 | 6-145 |
| PN29086 | (AF001395; AAB53810.1) | | (output |
| (SEQ ID NO: | | | trait) |
| 158) | | | |
| OsPIP2A | O. sativa Aquaporin | 316-583 | 123-290 |
| PN29098 | (AF062393) | | (output |
| (SEQ ID NO: | | | trait) |
| 160) | | | |
| OsPN22825 | Novel Protein PN22825, Fragment | 316-583 | 5-129 |
| (SEQ ID NO: | | | (input |
| 80) | | | trait) |
| OsPN29076 | Novel Protein PN29076, Fragment | 316-583 | 1-187 |
| (SEQ ID NO: | | | 43-388 |
| 82) | | | 122-304 |
| | | | (output |
| | | | trait) |
| OsPN29077 | Novel Protein PN29077, Fragment, | 316-583 | 4 × 1-242 |
| (SEQ ID NO: | Similar to A. thaliana DNA-Damage | | (output |
| 84) | Inducible Protein DDI1-Like | | trait) |
| | (BAB02792; 5e⁻⁹⁴) | | |
| OsPN29084 | Novel Protein PN29084, Fragment, | 316-583 | 3 × 1-253 |
| (SEQ ID NO: | Similar to Soybean (Glycine max) | | (output |
| 86) | Calcium-Dependent Protein Kinase | | trait) |
| | (A43713, 2e⁻⁷⁹) | | |
| OsPN29113 | O. sativa DNAJ Homologue | 316-583 | 1-92 |
| (SEQ ID NO: | (BAB70509.1) | | (output |
| 162) | | | trait) |
| OsPN29115 | Novel Protein PN29115, Fragment, | 316-583 | 1-188 |
| (SEQ ID NO: | Similar to A. thaliana 6,7-Dimethyl- | | (output |
| 88) | 8-Ribityllumazine Synthase | | trait) |
| | Precursor | | |
| | (AAK93590, 6e⁻³⁷) | | |
| OsPN29116 | Novel Protein PN29116, Fragment | 316-583 | 1-169 |
| (SEQ ID NO: | | | (output |
| 90) | | | trait) |
| OsPN29117 | Novel Protein PN29117 | 316-583 | −7-151 |
| (FL_R01_P078_N11. | | | (output |
| fasta.contig1)* | | | trait) |
| (SEQ ID NO: | | | |
| 92) | | | |
| OsPN29118 | Novel Protein PN29118, Fragment | 316-583 | 1-136 |
| (SEQ ID NO: | | | (output |
| 94) | | | trait) |
| OsPN29119 | Novel Protein PN29119, Fragment | 316-583 | −53 to 155 |
| (FL_R01_P084_P01. | | | (output |
| g.1a.Sp6a) | | | trait) |
| (SEQ ID NO: | | | |
| 96) | | | |

*OsPN29117 also interacts with heat shock protein hsp70 (OsHSP70, PN20775): three prey clones of OsPN29117 (one encoding amino acids 11-160, two encoding amino acids 29-160) from the output trait library interacted with a clone (amino acids 138-360) of OsHSP70 used as bait.

Yeast Two-Hybrid Using OsCHIB1 (Chitinase, Class III) as Bait

[0525] The rice class III chitinase (GENBANK® Accession No. AF296279) is a 286-amino acid protein. Chitinases are glycohydrolases that degrade chitin. Chitin is a structural component of insects, nematodes, fungi, and bacteria. Chitinases are one of the several kinds of pathogenesis-related (PR) proteins induced in higher plants in response to infection by pathogens (reviewed in Stintzi et al., Biochimie. 75(8): 687-706, 1993). While chitinases perform multiple biological functions, the class III chitinases' substrate specificity for bacterial cell walls suggests a main role for these enzymes as defense proteins (Brunner et al., supra). The enzyme directly attacks the pathogen by degrading the fungal or bacterial cell wall.

[0526] The bait fragment used in this search encodes amino acids 10 to 200 of OsCHIB1 (Chitinase, Class III). This region of the protein includes the active site of the enzyme (amino acids 127 to 135). There is no match for the gene encoding OsCHIB1 on TMRI's GENECHIP® Rice Genome Array.

[0527] OsCHIB1 (Chitinase, Class III) was found to interact with OsCATA (PN20899; O. sativa Catalase A Isozyme (D29966; BM06232)). Catalase A (GENBANK® Accession No. D29966) is the product of the rice CatA gene, which was identified by Higo and Higo, Plant Mol. Biol. 30(3): 505-521, 1996 as the homologue of the Cat-3 gene from Indian corn (Zea mays; GENBANK® Accession No. L05934). Both rice CatA and Z. mays Cat-3 genes belong to the monocot-specific group, one of three groups into which plant catalase genes have been classified based on their molecular evolution from a common ancestor (Guan and Scandalios, J. Mol. Evol. 42(5): 570-579, 1996). Rice catalase A contains 491 amino acids with two catalytic sites in position H65 and N138, and a heme binding-site in position Y348. The heme group is a cofactor for catalases' enzymatic activity. Higo and Higo, supra, showed that the CatA gene is expressed at high levels in seeds during early development and also in young seedlings, and that this gene is induced by the herbicide paraquat, but not or only slightly by abscisic acid (ABA), wounding, salicylic acid, and hydrogen peroxide.

[0528] Catalases are stress-induced enzymes found in almost all aerobic organisms. They are part of the enzymatic detoxification mechanism against active oxygen species (AOS) in plant cells. AOS are induced in response to environmental stress and act as signaling molecules to activate multiple defense responses through induction of PR genes and of other signaling molecules (e.g., salicylic acid, SA), leading to increased stress tolerance (Lamb and Dixon, Ann. Rev. Plant Biol. 48 (1): 251, 1997). AOS, however, can also damage proteins, membrane lipids, DNA and other cellular components of the plant. The balance between these two diverging effects depends on the tight control of cellular levels of AOS, which is achieved through a diverse battery of oxidant scavengers. Among these antioxidant molecules, catalases protect plant cells from the toxic effects of the AOS precursor hydrogen peroxide generated in the oxidative burst by converting it to dioxygen and water (reviewed in Dat et al., Redox Rep. 6(1): 37-42, 2001).

[0529] OsCHIB1 (Chitinase, Class III) was found to interact with O. Sativa Cellulose Synthase Catalytic Subunit, RSW1-Like (OsCS; PN19707). The prey clone found in our search, retrieved from the input trait library, encodes amino acids 411 to 489 of rice cellulose synthase catalytic subunit. This region of the 583-amino acid protein is C-terminal to the transmembrane domains and is predicted by amino acid sequence analysis to be on the cytoplasmic side of the plasma membrane.

[0530] Cellulose synthase is a membrane-bound enzyme complex comprising multiple isoforms. Cellulose synthase catalytic subunit (GENBANK® Accession No. AF030052) is involved in the synthesis of cellulose, a polysaccharide that is an essential component of the cell wall of higher plants. Cellulose imparts mechanical properties to plants which determine plant growth and cell shape, and its production impacts many aspects of plant biology. Most plants synthesize cellulose at the plasma membrane through the activity of cellulose synthase. As part of a structure called the rosette, the enzyme extends nascent cellulose chains by adding a sugar nucleotide precursor, and these chains then assemble into microfibrils that align in the same direction on the surface of the plasma membrane. This process seems to depend on a precise organization and orientation of the rosette (Perrin, R. M., Curr. Biol. 11(6): R213-6, 2001). A mutation in the A. thaliana rsw1 gene that causes cellulose disassembly results in altered root morphogenesis (Baskin et al., Aust. J. Plant Physiol. 19(4): 427-437, 1992), indicating that proper cellulose synthesis is critical to plant development and morphology. Arioli et al., Science 279(5351): 717-720, 1998 showed that the rsw1 gene in A. thaliana encodes a catalytic subunit of cellulose synthase. However, genetic and biochemical evidence now supports the concept that a family of genes encode the catalytic subunit of cellulose synthase in higher plants, with various members showing tissue-specific expression or being differentially expressed in response to various conditions. These topics are reviewed in Perrin, R. M., supra. These authors indicate that the presence of many genes for the cellulose synthase catalytic subunit in plants suggests that multiple isoforms of cellulose synthase can be needed in the same cell for the formation of functional multimeric complexes, most likely dimers. In addition, many other polypeptides have been detected within the rosette whose identities have not been determined. Interaction studies aimed at identifying the proteins interacting with synthase can help elucidate the organization of the cellulose synthase rosette machinery and address some of the questions that still remain about the biosynthesis of cellulose. There is no match for the gene encoding OsCS on TMRI's GENECHIP® Rice Genome Array.

[0531] Cellulose synthase catalytic subunit was also used as a bait protein. Its interactors are shown in Table 30 and discussed in later in this Example.

[0532] OsCHIB1 (Chitinase, Class III) was found to interact with Protein PN22823, which is similar to ABC Transporter Proteins (OsPN22823). Protein PN22823 is a 1239-amino acid protein that includes ten predicted transmembrane domains (amino acids 45 to 61, 154 to 170, 174 to 190, 253 to 269, 295 to 311, 671 to 687, 715 to 731, 794 to 810, 818 to 834, and 933 to 949) and two ATP/GTP-binding site motifs A (P-loops) (amino acids 383 to 390 and 1031 to 1038). A BLAST analysis against the Genpept database indicated that PN22823 shares 55% identity with Japanese goldthread (Coptis japonica) CjMDR1 (GENBANK® Accession No. AB043999.1; e=0.0). CjMDR1 is a multidrug resistance gene expressed in the rhizome, where alkaloids are highly accumulated compared to other organs (Yazaki et al., J. Exp. Bot. 52(357): 877-9, 2001). Other proteins highly similar to PN22823 include A. thaliana putative ABC transporter (GENBANK® Accession No. T02187; e=0) and putative P-glycoprotein (GENBANK® Accession No. NP_{—}171753; e=0). These types of proteins contain ATP-binding cassettes (ABC) and belong to a family that includes P-glycoprotein (P-gp) and multidrug resistance-associated protein 2 (MRP2) (reviewed by Fardel et al., Toxicology 167(1): 37-46, 2001). ABC proteins are membrane-spanning proteins that transport a wide variety of compounds across biological membranes, including phospholipids, ions, peptides, steroids, polysaccharides, amino acids, organic anions, drugs and other xenobiotics.

[0533] In mammals, ABC transporters participate in the biliary elimination of exogenous compounds and xenobiotics, and their expression can be up-regulated by these toxins. The large number of ABC transporter protein family members identified in A. thaliana (129 according to Sanchez-Fernandez et al., J. Biol. Chem. 276(32): 30231-30244, 2001), suggests an important role for these proteins in plants. In agreement with this notion, ABC transporters were among the immediate early genes found to be up-regulated in a tropical japonica rice cultivar (Oryza sativa cv. Drew) in response to jasmonic acid, benzothiadiazole, and/or blast infection (Xiong et al., Mol. Plant Microbe Interact. 14(5): 685-692, 2001). This suggests that ABC proteins play a role in defense against toxins in plants as they do in mammals. Most of the ABC transporters characterized in plants to date have been localized in the vacuolar membrane and are considered to be involved in the intracellular sequestration of cytotoxins (reviewed in Leslie et al., Toxicology 167(1): 3-23, 2001). Furthermore, plant ABC transporters appear to have a role equivalent to that of the mammalian ABC transporter in multidrug resistance, as shown in a study in which an ABC transporter protein was up-regulated in a Nicotiana plumbaginifolia cell culture following treatment with a close analog of the antifungal diterpene sclareol (Jasinski et al., Plant Cell 13(5): 1095-107, 2001). MRP homologues isolated from A. thaliana (AtMRPs) are implicated in providing herbicide resistance to plants (Rea et al., Annu. Rev. Plant Physiol. Plant Mol. Biol. 49: 727-760, 1998). There is also evidence that ABC transporter proteins act as hormone transporters as they do in mammals. Specifically, a mutation in one of the ABC transporters in A. thaliana, AtMRP5, results in decreased root growth and increased lateral root formation possibly due to the inability of the mutant AtMRP5 to act as an auxin conjugate transporter Gaedeke et al., EMBO J. 20(8): 1875-1887, 2001).

[0534] A BLAST analysis comparing the nucleotide sequence of Novel Protein PN22823 against TMRI's GENECHIP® Rice Genome Array sequence database identified probeset OS_ORF012127_at (e⁻¹⁴⁵ expectation value) as the closest match. Gene expression experiments indicated that this gene is induced by the fungal pathogen M. grisea.

[0535] OsCHIB1 (Chitinase, Class III) was found to interact with protein PN22154, which is similar to A. thaliana Glutamyl Aminopeptidase (OsPN22154). OsPN22154 is a 173-amino acid protein fragment that is 65% identical to a protein from A. thaliana (GENBANK® Accession No. AL035525) described as a homologue of mouse aminopeptidase (GENBANK® Accession No. U35646). The cDNA sequence of the A. thaliana aminopeptidase-like protein and the rice genome sequence (as a template) were used to generate a rice DNA sequence coding for a protein of 874 amino acids, which is 54.7% identical to the A. thaliana aminopeptidase-like protein. Indeed, domain analysis of the novel rice protein detected a peptidase M1 domain (amino acids 17 to 402), and a zinc-binding domain (amino acids 311 to 320), suggesting that this protein is a metallo-aminopeptidase. It is unclear whether this protein is encoded by an orthologue or an analogue of the A. thaliana aminopeptidase-like gene. A BLAST analysis comparing the nucleotide sequence of Novel Protein PN22154 against TMRI's GENECHIP® Rice Genome Array sequence database identified probeset OS_{—}004263 at (4e⁻⁸³ expectation value) as the closest match. Gene expression experiments indicated that this gene is expressed in panicle.

[0536] OsCHIB1 (Chitinase, Class III) was found to interact with protein PN29041 (OsPN29041). A BLAST analysis indicated that this protein fragment is similar to putative ATPase from A. thaliana (GENBANK® Accession No. AAG52137; e⁻¹⁷). ATPases can be localized to the plasma membrane which is adjacent to the cell wall. There is no match for this gene on TMRI's GENECHIP® Rice Genome Array, and thus no gene expression data that would allow prediction of its function during stress or infection. It is possible that this protein can have no role in pathogen invasion. However, it is part of the chitinase multiprotein complex identified in this Example through the yeast two-hybrid interactions, which we suggest exists at the cell wall interface. One hypothesis is that the ATPase-like protein can reside in the plasma membrane and participate in cell wall synthesis. Further interaction data can help elucidate the biological significance of its participation in the chitinase multiprotein complex.

[0537] OsCHIB1 (Chitinase, Class III) was found to interact with protein PN22020 (OsPN22020). Protein PN22020 is a 175-amino acid protein fragment that shares 55% identity with A. thaliana putative protein (GENBANK® Accession No. NP_{—}197783; 3e⁻³⁴). Analysis of the amino acid sequence identified a C2 domain (amino acids 5 to 90, e=0.037), as found in protein kinase C isozymes, which suggests that PN22020 can participate in signaling pathways similar to those modulated by protein kinase C. Perhaps its interaction with chitin represents a signaling event that occurs in response to pathogen or toxin exposure. However, this domain has been detected in other kinases and nonkinase proteins (Ponting and Parker, Protein Sci. 5(1): 162-166, 1996). Identification of the full amino acid sequence of novel protein PN22020 can make it possible to determine the class of C2 domain-containing proteins to which it belongs.

[0538] A BLAST analysis comparing the nucleotide sequence of Novel Protein PN22020 against TMRI's GENECHIP® Rice Genome Array sequence database identified probeset OS008182_r_at (e⁻¹⁰² expectation value) as the closest match. Gene expression experiments indicated that this gene is constitutively expressed in leaves, stems, roots, seeds, panicle and pollen.

Yeast Two-Hybrid Using OsCS as Bait

[0539] A second bait, namely O. sativa Cellulose Synthase Catalytic Subunit, RSW1-Like (OSCS; PN19707; GENBANK® Accession No. AF030052), was also used. This protein is described earlier in this Example because it was found to interact with the bait protein O. sativa Chitinase, Class III (OsCHIB1; PN19651). The bait fragment used in the search encodes amino acids 316 to 583 of OsCS.

[0540] OsCS was found to interact with O. sativa Cellulose Synthase Catalytic Subunit, RSW1-like (OsCS). In other words, OsCS was found to interact with itself. The prey clone was retrieved from the input trait library, and encoded almost the same amino acids as the bait clone (the prey clone encoded amino acids 316 to 582). The self-interaction supports the concept of cellulose synthase acting as a dimer, as has been suggested (see Perrin, R. M., Curr. Biol. 11(6): R213-R216, 2001)).

[0541] OsCS was also found to interact with O. sativa salT Gene Product (OsAAB53810). A BLAST analysis of the 145-amino acid protein OsAAB53810 amino acid sequence indicated that this protein is the rice salT Gene Product (AAB53810.1; 100% identity; 3e⁻⁸⁰). This protein is encoded by a cDNA clone, salT, which was isolated from rice roots subjected to salinity stress, as reported by Claes et al. (Plant Cell 2(1): 19-27, 1990). These authors showed that the salT mRNA is specifically expressed in sheaths and roots from mature plants and seedlings in response to salt stress and drought. Expression data reported previously by Garcia et al., Planta 207(2): 172-80, 1998 indicate that expression of salT in each region of the plant is dependent on the metabolic activity of the cells as well as on whether or not they are responding to stress. These authors also found that the salT gene is induced by gibberellic acid and abscisic acid and suggest that induction by these growth regulators occurs through independent and possibly antagonistic pathways. Analysis of the OsAAB53810 protein sequence predicted a jacalin-like lectin domain (amino acids 14 to 145, 2.3e⁻³²). Jacalin interacts with carbohydrates in a highly specific manner (Sankaranarayanan et al., Nat. Struct. Biol. 3(7): 596-603, 1996).

[0542] OsCS was also found to interact with Aquaporin (OsPIP2a). Aquaporin (GENBANK® Accession No. AF062393) is a 290-amino acid protein that includes six predicted transmembrane domains (amino acids 48 to 64, 83 to 99, 131 to 147, 175 to 191, 207 to 223, and 254 to 270) and a Major Intrinsic Protein (MIP) family signature (amino acids 34 to 271), as determined by amino acid sequence analysis. The prey clone retrieved from the output trait library encodes amino acids 123 to 290 of OsPIP2a, a region that includes the four most C-terminal predicted transmembrane domains and part of the MIP family signature. Aquaporin is thought to be a plasma membrane intrinsic protein (Malz and Sauter, Plant Mol. Biol. 40(6): 985-995, 1999). Such proteins facilitate movement of small molecules, often times functioning as water channels. This is why OsPIP2a is also called aquaporin. Malz and Sauter identified OsPIP2a along with OsPIP1a and report that these two proteins possess several hallmark motifs and homologies that justify their assignment to their respective PIP subfamilies. They report that OsPIP2a and OsPIP1a display similar, but not identical, expression patterns in rice, both being expressed at higher levels in seedlings than in adult plants, and that expression in the primary root is regulated by light. Furthermore, their study indicates that gibberellic acid also regulates the expression of these OsPIP transcripts in internodes of deepwater rice plants induced to grow rapidly by submergence, although expression did not correlate with growth. In A. thaliana, different PIP proteins are expressed in response to different agonists and conditions, e.g., salt stress induces tonoplast intrinsic protein (SITIP), as reported by Pih et al., Mol. Cells 9(1): 84-90, 1999. These authors suggest that PIP proteins can be responsible for osmoregulation in plants under high osmotic stress such as a high salt condition.

[0543] OsCS was also found to interact with protein PN22825 (OsPN22825). OsPN22825 is a 229-amino acid protein fragment for which the complete sequence is not known. A BLAST analysis against the public and Myriad's proprietary databases indicated that OsPN22825 is similar to two unknown proteins from A. thaliana (GENBANK® Accession No. NP_{—}188565, 67% identity, 3e⁻⁸²; and GENBANK® Accession No. AB025624, 37% identity, 3e⁻⁸²). There is no match for the gene encoding OsPN22825 on TMRI's GENECHIP® Rice Genome Array, and thus no gene expression data that would allow prediction of its function during stress or infection.

[0544] OsCS was also found to interact with protein PN29076 (OsPN29076).

[0545] OsPN29076 is a 389-amino acid protein fragment for which the complete sequence is not known. Analysis of the available amino acid sequence identified a cytochrome c family heme-binding site (amino acids 142 to 147). A BLAST analysis revealed no proteins with high similarity to OsPN29076, the best hit being an A. thaliana unknown protein (GENBANK® Accession No. AAF24616, 34% identity, 3e⁻⁴⁶). Three prey clones encoding amino acids 1 to 187, 42 to 389, and 121 to 304 of OsPN29076 were retrieved from the output trait library. The clones share an overlapping region which spans amino acids 121 to 187 of OsPN29076 and which includes the cytochrome c family heme-binding site. There is no match for the gene encoding OsPN29076 on TMRI's GENECHIP® Rice Genome Array, and thus no gene expression data that would allow prediction of its function during stress or infection. The lack of information about OsPN29076 makes it difficult to determine its function. Identification of the complete amino acid sequence for OsPN29076 can contribute to clarifying the function of this protein and the biological significance of the OsCS-OsPN29076 interaction.

[0546] OsCS was also found to interact with protein PN29077, which is similar to A. thaliana DNA-Damage Inducible Protein DDI1-Like (OsPN29077). OsPN29077 is 243-amino acid protein fragment for which the complete sequence is not known. A BLAST analysis indicated that OsPN29077 shares 73% identity with A. thaliana DNA-damage inducible protein DDI1-like (GENBANK® Accession No. BAB02792; 5e⁻⁹⁴). DDI1 is thought to be a cell-cycle checkpoint protein in yeast and its expression is induced by a variety of DNA-damaging agents. Such proteins arrest cells at certain stages and regulate the transcriptional response to DNA damage (Zhu and Xiao, Nucleic Acids Res. 26(23): 5402-5408, 1998). DDI1 has been reported to interact with ubiquitin (Bertolaet et al., Nat. Struct. Biol. 8(5): 417-422, 2001), an observation that supports the use of the yeast two-hybrid approach to study such proteins.

[0547] A BLAST analysis comparing the nucleotide sequence of OsPN29077 against TMRI's GENECHIP® Rice Genome Array sequence database identified probeset OS016688.1 at (e⁻⁸³ expectation value) as the closest match. Gene expression experiments indicated that this gene is not specifically expressed in several different tissue types and is not specifically induced by a broad range of plant stresses, herbicides, and applied hormones.

[0548] OsCS was also found to interact with protein PN29084, which is similar to G. max calcium-dependent protein kinase (OsPN29084). OsPN29084 is a 284-amino acid protein fragment for which the complete sequence is not known. Analysis of the available amino acid sequence identified four EF-hand calcium-binding domains (amino acids 110 to 122, 146 to 158, 182 to 194, and 216 to 228). In agreement with the presence of these domains, a BLAST analysis indicated that OsPN29084 is highly similar to many calcium-dependent protein kinases including soybean (G. max) calcium-dependent protein kinase (GENBANK® Accession No. A43713, 81% identity, 2e⁻⁷⁹). This soybean protein also includes four EF-hand calcium-binding domains and requires calcium but not calmodulin or phospholipids for activity (Harper et al., Science 252(5008): 951-954, 1991). Calcium can function as a second messenger through stimulation of such calcium-dependent protein kinases.

[0549] A BLAST analysis comparing the nucleotide sequence of OsPN29084 against TMRI's GENECHIP® Rice Genome Array sequence database identified probeset OS004083.1 at (e⁻⁸³ expectation value) as the closest match. Gene expression experiments indicated that this gene is not specifically expressed in several different tissue types and is not specifically induced by a broad range of plant stresses, herbicides, and applied hormones.

[0550] OsCS was also found to interact with O. sativa DNAJ homologue (OsPN29113). OsPN29113 is a 92-amino acid protein whose sequence includes an ATP/GTP-binding site motif A (P-loop, amino acids 43 to 50). A BLAST analysis of the available amino acid sequence indicated that OsPN29113 is the rice DNAJ homologue (GENBANK® Accession No. BAB70509.1; 100% identity; 5e³⁹). In eukaryotic cells, DnaJ-like proteins regulate the chaperone (protein folding) function of Hsp70 heat-shock proteins through direct interaction of different Hsp70 and DnaJ-like protein pairs (Cyr et al., Trends Biochem. Sci. 19(4): 176-181, 1994). Heat shock proteins (reviewed in Bierkens, J. G., Toxicology 153(1-3): 61-72, 2000) are stress proteins that function as intracellular chaperones to facilitate protein folding/unfolding and assembly/disassembly. They are selectively expressed in plant cells in response to a range of stimuli, including heat and a variety of chemicals. As regulators of heat shock proteins, DnaJ-like proteins are thus part of the plant protective stress response.

[0551] A BLAST analysis comparing the nucleotide sequence of OsPN29113 against TMRI's GENECHIP® Rice Genome Array sequence database identified probeset OS002926_at (e⁻¹²⁴ expectation value) as the closest match. Gene expression experiments indicated that this gene is not specifically expressed in several different tissue types and is not specifically induced by a broad range of plant stresses, herbicides, and applied hormones.

[0552] OsCS was also found to interact with protein PN29115, which is similar to A. thaliana 6,7-dimethyl-8-ribityllumazine synthase precursor (OsPN29115). OsPN29115 is a 188-amino acid protein fragment for which the complete sequence is not known. The available sequence includes an ATP/GTP-binding site motif A (P-loop, amino acids 94 to 101) and a 6,7-dimethyl-8-ribityllumazine synthase family signature (amino acids 42 to 186), as determined by analysis of the available amino acid sequence. The presence of the latter domain is in agreement with the results of a BLAST analysis indicating that OsPN29115 shares 50% identity with A. thaliana putative 6,7-dimethyl-8-ribityllumazine synthase precursor (GENBANK® Accession No. AAK93590, 6e³⁷). The cofactor riboflavin is synthesized from the precursor 6,7-dimethyl-8-ribityllumazine (Nielsen et al., J. Biol. Chem. 261(8): 3661-3669, 1986). Flavins are involved in numerous biological processes (reviewed by Massey, V., Biochem. Soc. Trans. 28(4): 283-296, 2000). For example, they participate in electron transfer reactions and thereby contribute to oxidative stress through their ability to produce superoxide, but at the same time flavins participate in the reduction of hydroperoxides, the products of oxygen-derived radical reactions. Flavins also contribute to soil detoxification and are linked to light-induced DNA repair in plants. The chemical versatility of flavoproteins is controlled by specific interactions with the proteins with which they are bound.

[0553] A BLAST analysis comparing the nucleotide sequence of OsPN29115 against TMRI's GENECHIP® Rice Genome Array sequence database identified probeset OS015577_at (e⁻⁴¹ expectation value) as the closest match. Gene expression experiments indicated that this gene is not specifically expressed in several different tissue types and is not specifically induced by a broad range of plant stresses, herbicides, and applied hormones.

[0554] OsCS was also found to interact with protein PN29116 (OsPN29116). OsPN29116 is a 170-amino acid protein fragment for which the complete sequence is not known. Analysis of the available amino acid sequence identified a WD40 domain (amino acids 82 to 118), which is reported to participate in protein-protein interactions (Ajuh et al., J. Biol. Chem. 276(45): 42370-42381, 2001). A BLAST analysis indicated that OsPN29116 shares identity with two unknown proteins from A. thaliana (GENBANK®) Accession No. T45879, 67% identity, e 64; and GENBANK® Accession No. NP_{—}181253, 69% identity, e⁻⁵⁸). The lack of information about OsPN29116 makes it difficult to determine its function. Identification of the complete amino acid sequence for OsPN29116 can clarify the function of this protein and the biological relevance of the OsCSC-OsPN29116 interaction.

[0555] A BLAST analysis comparing the nucleotide sequence of OsPN29116 against TMRI's GENECHIP® Rice Genome Array sequence database identified probeset OS016500_r_at (e⁻¹² expectation value) as the closest match. The expectation value is too low for this probeset to be a reliable indicator of the gene expression of OsPN29116.

[0556] OsCS was also found to interact with protein PN29117 (OsPN29117). OsPN29117 is a 237-amino acid protein that includes a ubiquitin domain (amino acids 12 to 84). Analysis of the amino acid sequence identified a BAG domain (amino acids 106 to 187, 2.1e⁻¹¹), which is known to bind and regulate Hsp70/Hsc70 molecular chaperones (Briknarova et al., Nat. Struct. Biol. 8(4): 349-352, 2001). The BAG family of cochaperones functionally regulates signal-transducing proteins and transcription factors important for cell stress responses, apoptosis, proliferation, cell migration and hormone action (Briknarova et al., supra; Antoku et al., Biochem. Biophys. Res. Commun. 286(5): 1003-1010, 2001). A BLAST analysis indicated that OsPN29117 shares identity with an A. thaliana unknown protein (GENBANK® Accession No. AAC14405, 44% identity, 4e⁻⁵²). In agreement with the notion that OsPN29117 is a member of the BAG family of proteins, it was also found to interact with hsp70 (OsHSP70) (see note * under Table 30). Heat shock proteins (discussed above) are stress proteins which function as ATP-dependent intracellular chaperones and which are selectively expressed in plant cells in response to a range of stimuli, including heat and a variety of chemicals. As a regulator of heat shock proteins, the BAG protein OsPN29117 can thus be part of the plant protective stress response.

[0557] The prey clone retrieved in the search encodes amino acids 1 to 151 of OsPN29117, a region that includes the ubiquitin domain. Note that the prey clone includes a small portion (−7 to 0) of the 5′ untranslated region, and thus its coordinates are shown in Table 2 as amino acids −7 to 151. A BLAST analysis comparing the nucleotide sequence of OsPN29117 against TMRI's GENECHIP® Rice Genome Array sequence database identified probeset OS017803_at (e⁻⁷³ expectation value) as the closest match. Gene expression experiments indicated that this gene is not specifically expressed in several different tissue types and is not specifically induced by a broad range of plant stresses, herbicides, and applied hormones.

[0558] OsCS was also found to interact with protein PN29118 (OsPN29118). OsPN29118 is a 136-amino acid protein fragment for which the complete sequence is not known. A BLAST analysis indicated that OsPN29118 has only weak similarity to proteins in the public domain and in Myriad's proprietary database, the best hit being an A. thaliana putative zinc finger protein SHI-like (GENBANK® Accession No. NP_{—}201436, 42% identity, 5e⁻¹⁵). The protein with the next highest identity is an A. thaliana hypothetical protein (GENBANK® Accession No. T04595, 38% identity, 9e⁻¹⁵). Discovery of the complete amino acid sequence for OsPN29118 can contribute to clarifying the function of this protein and the biological relevance of the OsCSC-OsPN29118 interaction.

[0559] A BLAST analysis comparing the nucleotide sequence of OsPN29118 against TMRI's GENECHIP® Rice Genome Array sequence database identified probeset OS004996.1_at (e-³⁸ expectation value) as the closest match. Gene expression experiments indicated that this gene is not specifically expressed in several different tissue types and is not specifically induced by a broad range of plant stresses, herbicides, and applied hormones.

[0560] OsCS was also found to interact with protein PN29119 (OsPN29119). OsPN29119 is a 327-amino acid protein fragment for which the complete sequence is not known. A BLAST analysis indicated that OsPN29119 shares 38% identity with an A. thaliana unknown protein, T17H3.9 (GENBANK® Accession No. AAD45997, 7e-⁵⁴). Discovery of the complete amino acid sequence for OsPN29119 can contribute to clarifying the function of this protein and the biological relevance of the OsCSC-OsPN29119 interaction. One prey clone encoding amino acids 1 to 155 of OsPN29119 was retrieved from the output trait library. This prey clone includes a portion of the 5′ untranslated region and thus its coordinates are shown in Table 2 as amino acids −53 to 155. A BLAST analysis comparing the nucleotide sequence of OsPN29119 against TMRI's GENECHIP® Rice Genome Array sequence database identified probeset OS014829.1_at (e⁻¹³¹ expectation value) as the closest match. Gene expression experiments indicated that this gene is not specifically expressed in several different tissue types and is not specifically induced by a broad range of plant stresses, herbicides, and applied hormones.

Summary

Proteins that Interact with OsCHIB1 (Chitinase, Class III).

[0561] The yeast two-hybrid assay designed to search for proteins interacting with the chitinase bait proteins led to the isolation of proteins that appear to be associated with the plant defense response to pathogens. Resistance to disease occurs on several levels that include local and nonspecific systemic responses. The hypersensitive response (HR) in plants is a mechanism of local resistance to pathogenic microbes characterized by a rapid and localized tissue collapse and cell death at the infection site, resulting in immobilization of the intruding pathogen. This process is triggered by pathogen elicitors and orchestrated by an oxidative burst, which occurs rapidly after the attack (Lamb and Dixon, Ann. Rev. Plant Biol. 48(1): 251, 1997). The accumulation of active oxygen species (AOS) is a central theme during plant responses to both biotic and abiotic stresses. AOS are generated at the onset of the HR and might be instrumental in killing host tissue during the initial stages of infection. AOS also act as signaling molecules that induce expression of PR genes and production of other signaling molecules which participate in the signal cascade that leads to PR gene induction. The triggering of defense genes can extend to the uninfected tissues and the whole plant, leading to local resistance (LR) and systemic acquired resistance (SAR; reviewed in Martinez et al., Plant Physiol. 122(3): 757-766, 2000). As a result of SAR, other portions of the plant are provided with long-lasting protection against the same and unrelated pathogens.

[0562] Hydrogen peroxide from the oxidative burst plays an important role in the localized HR not only by driving the cross-linking of cell wall structural proteins, but also by triggering cell death in challenged cells and as a diffusible signal for the induction in adjacent cells of genes encoding cellular protectants such as glutathione S-transferase and glutathione peroxidase, and for the production of salicylic acid (SA). SA is thought to act as a signaling molecule in LR and SAR through generation of SA radicals, a likely by-product of the interaction of SA with catalases and peroxidases, as reported by Martinez et al. (supra). These authors showed that recognition of a bacterial pathogen by cotton triggers the oxidative burst that precedes the production of SA in cells undergoing the HR, and that hydrogen peroxide is required for local and systemic accumulation of SA, thus acting as the initiating signal for LR and SAR. The involvement of catalase in SA-mediated induction of SAR in plants was previously demonstrated by Chen et al., Science 262(5141): 1883-1886, 1993 who showed that binding of catalase to SA results in inhibition of catalase activity, and that consequent accumulation of hydrogen peroxide induces expression of defense-related genes associated with SAR.

[0563] In this study, chitinase was found to interact with catalase A. Given the established role of chitinase as a defense protein, this interaction is consistent with the presence of the stress-induced catalase during pathogen attack and suggests that both enzymes can be located at the cell wall, where they participate in PR gene induction. The significance of the chitinase-catalase interaction as part of the defense response against microbes finds further support in the observation that fungal catalase has a role in protecting necrotrophic fungi from the deleterious effects of AOS during colonization of a host expressing the HR (Mayer et al., Phytochemistry 58(1): 33-41, 2001). These organisms were shown to secrete catalase, among other enzymes, to remove or inactivate AOS from the host.

[0564] In addition, the cell wall can play a role in defense against bacterial and fungal pathogens by receiving information from the surface of the pathogen from molecules called elicitors, and by transmitting this information to the plasma membrane of plant cells, resulting in gene-activated processes that lead to resistance. One type of biochemical reaction induced by elicitors and associated with the hypersensitive response is the synthesis and accumulation of phytoalexins, antimicrobial compounds produced in the plant after fungal or bacterial infection (reviewed in Hammerschmidt, R., Ann. Rev. Phytopathol. 37: 285-306, 1999). One of the proteins found to interact with chitinase is an ABC transporter. ABC transporters are known to sequester cytotoxins, metabolites and other molecules from plant tissues. It is thus likely that the ABC transporter found to interact with chitinase resides at the cell wall, where it participates in the transport of toxins. Though the function of phytoalexins in the plant defense response has not been thoroughly elucidated (Hammerschmidt, R., supra), it is tempting to speculate that the ABC transporter can be involved in the elimination of these toxins from the plant cells during the plant pathogen-induced defense response. Furthermore, gene expression experiments indicated that the gene encoding the ABC transporter protein is induced by the fungal pathogen M. grisea. These results are consistent with the putative role of this protein in the defense response induced by pathogenic fungi and bacteria in rice.

[0565] Chitinase was also found to interact with novel protein PN22154 similar to A. thaliana glutamyl aminopeptidase. While the specific function of this prey protein has not been determined, it is well known that proteolytic activity is a common component of plant defense mechanisms against pathogens. These mechanisms include both chitinases and proteases. Peptidase activity has been associated with regulation of signaling. Carboxypeptidases, for instance, hydrolytically remove the pyroglutamyl group from peptide hormones, thereby activating these signaling molecules. A carboxypeptidase regulates Brassinosteroid-insensitive 1 (BRI1) signaling in A. thaliana by proteolytic processing of a protein (Li et al., Proc. Natl. Acad. Sci. USA 98(10): 5916-5921, 2001). Based on its ability to interact with chitinase and on the well-established role of the latter in PR defense, chitinase and novel protein PN22154 can interact as components of a complex with chitinolytic and proteolytic activities targeted against plant invaders, and that the rice glutamyl aminopeptidase-like protein can have a role in activating signaling molecules at the cell wall that are involved in the plant defense response.

[0566] A fourth interactor found for chitinase is cellulose synthase catalytic subunit. This enzyme acts as a complex at the plasma membrane where it participates in cell wall synthesis, and its regulation can allow the plant to respond with morphological changes to physical insult produced by pathogen attack. This interaction can be significant to maintaining the balance of the metabolism of cell wall components during the defense response. It is possible that either chitinase resides at the cell wall where it interacts with cellulose synthase immediately following pathogen attack, or chitinase is targeted to this site and interacts with synthase after PR gene induction.

[0567] Aside from novel proteins PN22020 and PN29041, the rice proteins found to interact with chitinase appear to be localized at or recruited to the cell wall where they participate in the plant defense response to pathogen attack. Two of the interactors, an ABC transporter and a glutamyl aminopeptidase-like protein, are newly characterized proteins in rice.

[0568] As a whole, all of these proteins can interact as a multicomponent complex at the cell wall interface in the plant cell, and all can have roles in controlling AOS levels, inducing PR genes, and synthesizing and maintaining the integrity of the cell wall to protect the plant against the effects of pathogen invasion.

Proteins that Interact with Cellulose Synthase Catalytic Subunit (OsCS)

[0569] The interactions involving OsCS expand the stress-response protein network identified for the chitinase bait protein. OsCS interacts with several proteins that appear to participate in the plant response to pathogen-induced stress at the cell wall. Published evidence links some of these proteins to the plant response to various stresses. These include aquaporin (OsPIP2a) and salt-stress induced protein (OsAAB53810), two molecules that, although they can not have a direct role in disease resistance, can function as membrane-spanning pumps in the protein complex at the cell wall to regulate turgor pressure or transmit solutes. Moreover, the presence of the jacalin-like lectin domain in OsAAB53810 is of particular interest in the context of its interaction with an enzyme that synthesizes carbohydrate chains. Given the carbohydrate-binding property of jacalin (Sankaranarayanan et al., Nat. Struct Biol. 3(7): 596-603, 1996), OsAAB53810 can specifically bind nascent cellulose chains as they are produced by OsCS, thus playing an active role in OsCS-dependent events relating to cell wall metabolism. The fact that OsAAB53810 is induced by salt and stress supports a role for this protein in such physiological events.

[0570] Another interactor, the rice DNAJ homologue OsPN29113, likely participates in the plant protective stress response by regulating the chaperone function of heat shock proteins, which are induced by various forms of stress. It is possible that the interaction of the DNAJ protein with cellulose synthase is part of the plant response to chemicals produced by pathogens or generated in cells undergoing the HR, and that such response is associated with injury to the cell wall that has occurred in response to the stress.

[0571] Among the novel proteins found to interact with OsCS, OsPN29077 is similar to A. thaliana DNA-damage inducible protein DDI1-like. Based on the expression of yeast DDI1 in response to DNA damage and on sequence homology, we speculate that OsPN29077 performs the same function as DDI1 and that the OsCS-OsPN29077 interaction is associated with the plant defense mechanism against DNA damage. Likewise, we attribute the BAG-like protein OsPN29117 a putative role in the plant protective stress response as a regulator of heat shock proteins. In agreement with this role, OsPN29117 also interacts with hsp70, which our gene expression experiments indicate is expressed constitutively and is down-regulated by jasmonic acid (see chart in Appendix 1), a component of plant defense response pathways. Since OsPN29077 and OsPN29117 interact with the cellulose synthase catalytic subunit, and the latter interacts with the pathogen-induced defense protein chitinase, these interactors can be a part of the same complex at the cell wall where they participate in the response to pathogen attack.

[0572] The novel protein OsPN29115 is similar to the riboflavin precursor 6,7-dimethyl-8-ribityllumazine synthase precursor from A. thaliana. Among the roles reported for riboflavin is its association with the redox reactions occurring as a result of oxidative stress (Massey, V., Biochem. Soc. Trans. 28(4): 283-96, 2000). Based on this evidence and on sequence homology for the identified interactor, the OsCS-OsPN29115 interaction can link the plant response to stress and toxins produced by pathogens with structural changes requiring OsCS activity.

[0573] Additional novel proteins interacting with OsCS include a protein similar to soybean calcium-dependent protein kinase (OsPN29084) and a protein similar to A. thaliana putative zinc finger protein (OsPN29118). The similarities of these interactors to protein kinases and zinc finger proteins suggest that they function as mediators of molecular signaling and transcription, respectively. Their interactions with OsCS can represent signaling or transcriptional events occurring after disruption following damage to the cell wall by pathogens, and these prey proteins can move from the cell wall to other parts of the cell to mediate such events. The OsCS-OsPN29084 interaction likely represents a step in the transduction of an extracellular signal that results in a physiological response, while the OsCS-OsPN29118 interaction can be associated with transcriptional regulation also in response to an extracellular signal. This signal can be in the form of an insult to the plant produced by pathogen attack.

[0574] For the remaining proteins found to interact with OsCS—OsPN22825, OsPN29076, OsPN29116, and OsPN29119—based on their association with cellulose synthase and chitinase, these prey proteins can also be important factors for pathogen defense, cell wall integrity, or for holding together protein complexes.

[0575] Thus, the results presented in this Example show that proteins interacting with the cellulose synthase catalytic subunit are also part of the chitinase multiprotein complex localized at the cell wall interface.

### Example V

[0576] Janssens and Goris teach that type 2A serine/threonine protein phosphatases (PP2A) are important regulators of signal transduction, which they affect by dephosphorylation of other proteins (Janssens and Goris, Biochem J. 353(Pt 3): 417-439, 2001). Members of the protein phosphatase 2A (PP2A) family of serine/threonine phosphatases contain a well-conserved catalytic subunit, the activity of which is highly regulated (Janssens and Goris, supra). There are multiple PP2A isoforms in plants and other organisms, and they appear to be differentially expressed in various tissues and at different stages of development (Arino et al., Plant Mol. Biol. 21(3): 475-485, 1993). Harris et al. cites a number of reports describing the association of PP2A subunits with a variety of cellular proteins in addition to regulatory subunits, suggesting that PP2As function as regulators of various signaling pathways associated with protein synthesis, cell cycle and apoptosis (Harris et al., Plant Physiol. 121(2): 609-617, 1999). PP2A enzymes have been implicated as mediators of a number of plant growth and developmental processes.

[0577] In addition, PP2A enzymes play a role in pathogen invasion. In animals, a variety of viral proteins target specific PP2A enzymes to deregulate chosen cellular pathways in the host and promote viral progeny (Sontag, E., Cell Signal 13(1): 7-16, 2001; Garcia et al., Microbes Infect. 2(4): 401407, 2000). PP2A enzymes interact with many cellular and viral proteins, and these protein-protein interactions are critical to modulation of PP2A signaling (Sontag, supra). The proteins interacting with PP2A (e.g., PP2A) can, for example, target PP2A to different subcellular compartments, or affect PP2A enzyme activity. Moreover, PP2A enzymes play a role in plants in their response to viral infection (Dunigan and Madlener, Virology 207(2): 460-466, 1995). Indeed, serine/threonine protein phosphatase is required for tobacco mosaic virus-mediated programmed cell death (Dunigan and Madlener, supra).

[0578] OsPP2A-2 (GENBANK® Accession No. AF134552) is a 308-amino acid subunit of a family of protein phosphatases that contains a serine/threonine protein phosphatase signature (amino acids 112 to 117).

[0579] As described above, a yeast two-hybrid approach was taken to dissect PP2A-mediated signaling events. The bait fragments used in this search and found to have interactors encode amino acids 1 to 308 and 150-308 of OsPP2A-2.

[0580] The second bait used in this Example, OsCAA90866, is a protein encoded by a complete cDNA sequence that is only known to be inducible by chilling in rice. OsCAA90866 was chosen as a bait for these interaction studies based on its relevance to abiotic stress. Investigation into the interactions involving OsCAA90866 will provide insight into the function of this poorly defined protein. The identification of rice genes involved in modulating the response of the plant to an environmental challenge, thus conferring it a selective advantage, would facilitate the generation and yield of crops resistant to abiotic stress.

Results

[0581] OsPP2A-2 was found to interact with rice putative proline-rich protein, which is possibly a transcriptional regulator, and with the seed storage protein glutelin. The search also identified five novel rice proteins interacting with OsPP2A-2: a putative PP2A regulatory subunit protein also similar to rice chilling-inducible protein CAA90866 (the second bait protein of this Example); an enzyme similar to phosphoribosylanthranilate transferase that is likely involved in the plant response to pathogen infection; a disulfide isomerase, with a putative role in protein folding; a voltage-dependent ion channel protein; and a DnaJ-like protein with a putative role in the pathogen-induced defense response.

[0582] The second bait protein of this Example, chilling-inducible protein CAA90866 was found to interact with itself and with six proteins. One of these is the same putative PP2A regulatory subunit protein (similar to the bait protein itself) found to interact with the bait OsPP2A-2 of described in this Example. This interaction links the two networks of proteins identified in thi Example (i.e., links proteins associated with biotic and abiotic stress to phosphatases). The other interactors identified in this search include a 14-3-3-like protein that is induced under various abiotic stress conditions; a pyrrolidone carboxyl peptidase-like protein with a putative role in activating signaling peptides involved in the plant's response to cold stress; a novel protein containing an inositol phosphate domain likely involved in regulation of signaling events associated with cold tolerance; a novel rice homolog of wheat initiation factor (iso)4f p82 subunit with a putative role in RNA decay pathways associated with stress conditions; and a novel protein similar to plants 2-dehydro-3-deoxyphosphooctonate aldolase.

[0583] The interacting proteins of the Example are listed in Table 11 and Table 12 below, followed by detailed information on each protein and a discussion of the significance of the interactions. A diagram of the interactions is provided in FIG. 3. The nucleotide and amino acid sequences of the proteins of the Example are provided in SEQ ID NOs: 97-112 and 163-174.

[0584] Some of the proteins identified represent rice proteins previously uncharacterized. Based on their presumed biological function and on their ability to specifically interact with the bait proteins OsPP2A-2 or OsCAA90866, we speculate that the proteins interacting with OsPP2A-2 represent a network involved in the rice defense response to biotic stress, and those interacting with OsCAA90866 are associated with the abiotic stress response. Importantly, the interactions identified suggest that phosphatases play a role in the regulation of both biotic and abiotic stress response in rice.

TABLE 11

Interacting Proteins Identified for OsPP2A-2
(Serine/Threonine Protein Phosphatase PP2A-2).

| | | | |
|---|---|---|---|
| | | | Prey |
| | Protein Name | Bait | Coord |
| Gene Name | (GENBANK ® Accession No.) | Coord | (Source) |

BAIT PROTEIN

| | | | |
|---|---|---|---|
| OsPP2A-2 | O. sativa Serine/Threonine | | |
| PN20254 (AF134552- | Protein Phosphatase PP2A- | | |
| OS002763) | 2, Catalytic Subunit | | |
| (SEQ ID NO:164) | (AF134552, AAD22116) | | |
| INTERACTORS | | | |
| OsAAK63900 | O. sativa Putative Praline- | 1-308 | 122-224 |
| PN23266 | Rich Protein AAK63900 | | (input |
| (SEQ ID NO:166) | (AC084884) | | trait) |
| OsORF020300-2233.2 | Hypothetical Protein | 1-308 | 93-387 |
| PN21639 (2233(2)-OS- | ORF020300-2233.2, | | 118-388 |
| ORF020300 novel | Putative PP2A Regulatory | | (input |
| (SEQ ID NO:98) | Subunit, Similar to | | trait) |
| | OsCAA90866 | | |
| | (AAD39930; 5e⁻⁹²) | | |
| | (CAA90866; 5e⁻⁵³) | | |
| OsPN23268 | Novel Protein 23268, | 1-308 | 2 × 12-200 |
| PN23268 novel | Similar to | | (input |
| (SEQ ID NO:100) | Phosphoribosylanthranilate | | trait) |
| | Transferase, Chloroplast | | |
| | Precursor, Fragment | | |
| | (AAB02913.1; 5e⁻⁹⁵) | | |
| OsCAA33838 | O. sativa Glutelin | 150-308 | 5-155 |
| PN24775 | CAA33838 | | (output |
| (SEQ ID NO:168) | (X15833) | | trait) |
| OsPN26645 | Novel Protein PN26645, | 1-308 | 24-164 |
| (Contig3412.fasta. | Putative Protein Disulfide | | (input |
| Contig1) (novel) | Isomerase-Related Protein | | trait) |
| (SEQ ID NO:102) | Precursor | | |
| | (BAB09470.1; e⁻²⁸) | | |
| OsPN24162 | Novel Protein PN24162, | 150-308 | 28-164 |
| (Contig3453.fasta. | Porin-like, Voltage- | | (output |
| Contig1) (novel) | Dependent Anion Channel | | trait) |
| (SEQ ID NO:104) | Protein (NP_201551; 3e⁻⁸⁶) | | |
| Os011994-D16 PN20618 | Hypothetical Protein | 150-308 | 99-368 |
| (FL_R01_P028_ | 011994-D16, Similar to Z. | | (output |
| D16OS011994) (novel) | mays DnaJ protein | | trait) |
| (SEQ ID NO:106) | (T01643; e = 0) | | |

[0585] The names of the clones of the proteins used as baits and found as preys are given. Nucleotide/protein sequence accession numbers for the proteins of the Example (or related proteins) are shown in parentheses under the protein name. The bait and prey coordinates (Coord) are the amino acids encoded by the bait fragment(s) used in the search and by the interacting prey clone(s), respectively. The source is the library from which each prey clone was retrieved.

TABLE 12

Interacting Proteins Identified for OsCAA90866
(O. sativa Chilling-Inducible Protein CAA90866).

| | | | |
|---|---|---|---|
| | | | Prey |
| | Protein Name | Bait | Coord |
| Gene Name | (GENBANK ® Accession No.) | Coord | (Source) |

BAIT PROTEIN

| | | | |
|---|---|---|---|
| OsCAA90866 | O. sativa Chilling- | | |
| PN20311 | Inducible Protein | | |
| (984756_OS015052)\ | CAA90866 | | |
| (SEQ ID NO:170) | (Z54153, CAA90866) | | |
| INTERACTORS | | | |
| OsCAA90866 | O. sativa Chilling- | 100-250 | 1-126 |
| PN20311 | Inducible Protein | | (output |
| (SEQ ID NO:170) | CAA90866 | | trait) |
| | (Z54153, CAA90866) | | |
| Os008938-3209 | O. sativa Putative | 100-250 | 4 × 53-259 |
| PN20215 (3209- | 14-3-3 Protein | | (input |
| OS208938) | (AAK38492) | | trait) |
| (SEQ ID NO:172) | | | |
| OsAAG46136 | O. sativa Putative | 100-250 | 2 × 92-222 |
| PN23186 | Pyrrolidone Carboxyl | | (input |
| (SEQ ID NO:174) | Peptidase | | trait) |
| | (AAG46136) | | |
| OsORF020300-223 | Hypothetical Protein | 100-250 | 3 × 1-206 |
| PN21639 | ORF020300-2233.2, | | 3 × 1-190 |
| (SEQ ID NO:98) | Putative PP2A | | (output |
| | Regulatory Subunit, | | trait) |
| | Similar to OsCAA90866 | | |
| | (AAD39930; 5e⁻⁹²) | | |
| | (CAA90866, 5e⁻⁵³) | | |
| OsPN23045 | Novel Protein PN23045 | 100-250 | 2 × 240-287 |
| (SEQ ID NO:108) | | | (input |
| | | | trait) |
| OsPN23225 | Novel Protein PN23225, | 100-250 | 639-792 |
| (SEQ ID NO:110) | Similar to Tritticum | | (input |
| | aestivum Initiation | | trait) |
| | Factor (iso)4f p82 | | |
| | Subunit | | |
| | (AAA74724; e = 0) | | |
| OsPN29883 | Novel Protein PN29883, | 100-250 | 58-175 |
| (SEQ ID NO:112) | Fragment | | (output |
| | | | trait) |

The names of the clones of the proteins used as baits and found as preys are given. Nucleotide/protein sequence accession numbers for the proteins of the Example (or related proteins) are shown in parentheses under the protein name. The bait and prey coordinates (Coord) are the amino acids encoded by the bait fragment(s) used in the search and by the interacting prey clone(s), respectively. The source is the library from which each prey clone was retrieved.
Two Hybrid Using OsPP2A as a Bait

[0586] The bait fragment encoding amino acids 1 to 308 of O. sativa Serine/Threonine Protein Phosphatase PP2A-2, Catalytic Subunit (OsPP2A-2) was found to interact with O. sativa (rice) putative proline-rich protein, which is possibly a transcriptional regulator. The bait fragment (i.e., aa 1-308 of OsPP2A-2) includes the serine/threonine protein phosphatase signature of OsPP2A-2. One prey clone encoding amino acids 122 to 224 of OsAAK63900 was retrieved from the input trait library. Somewhat surprisingly, this prey clone does not code for the HLH domain of OsAAK63900.

[0587] O. sativa Putative Proline-Rich Protein MK63900 (OsAAK63900) (GENBANK® Accession No. AC084884) is a 224-amino acid protein that includes a putative transmembrane spanning region (amino acids 7 to 23). It also contains a gntR family signature (amino acids 10 to 34) common to a group of DNA-binding transcriptional regulation proteins in bacteria (see Buck and Guest, Biochem. J. 260: 737-747, 1989; Haydon and Guest, FEMS Microbiol. Lett. 79: 291-296, 1991; and Reizer et al., Mol. Microbiol. 5: 1081-1089, 1991. This signature includes a helix loop helix (HLH) protein dimerization domain (amino acids 5 to 20) that is often found in transcription factors (see Murre et al., Cell 56: 777-783, 1989; Garrel and Campuzano, BioEssays 13: 493-498, 1991, Kato and Dang, FASEB J. 6: 3065-3072, 1992; Krause et al., Cell 63: 907-919, 1990; and Riechmann et al., Nucl. Acids Res. 22: 749-755, 1994). However, no DNA-binding motif is detectable.

[0588] Note that analysis of the amino acid sequence of OsAAK63900 also detected an Ole e I family signature (amino acids 30 to 162) including six conserved cysteines that are involved in disulfide bonds. This signature is a conserved region found in a group of plant pollen proteins of unknown function which tend to be secreted and consist of about 145 amino acids (and thus are shorter than OsAAK63900). The first of the Ole e I family of proteins to be discovered was Ole e I (IUIS nomenclature), a constitutive protein in the olive tree Olea europaea pollen and a major allergen (Villalba et al., Eur. J. Biochem. 216(3): 863-869, 1993).

[0589] The bait fragment encoding amino acids 1 to 308 of OsPP2A-2 (which includes the serine/threonine protein phosphatase signature of OsPP2A-2) was also found to interact with O. sativa OsORF020300-2233.2, a novel 418-amino acid protein which has a putative PP2A regulatory subunit, similar to OsCAA90866. Two prey clones encoding amino acids 93 to 387 and 118 to 388 of ORF020300-233 were retrieved from the input trait library, which indicates that OsORF020300-223 interacts with OsPP2A-2 through a region within amino acids 118 to 387. OsORF020300-223 includes a possible cleavage site between amino acids 50 and 51, although it appears to have no N-terminal signal peptide. OsORF020300-223 is similar to A. thaliana PP2A regulatory subunit (GENBANK® Accession No. MD39930.1; 44.5% amino acid sequence identity; 5e⁻⁹¹ expectation value). OsORF020300-223 is also similar to rice chilling-inducible protein CAA90866 (GENBANK® Accession No. CAA90866, 68% sequence identity; 9e⁻⁴⁸ expectation value), a protein related to chilling tolerance in rice, with which OsORF020300-223 also interacts. CAA90866 was also used as a bait protein, and the interactions identified for it are discussed later in this Example.

[0590] A BLAST analysis comparing the nucleotide sequence of OsORF020300-223 against TMRI's GENECHIP® Rice Genome Array sequence database (http://tmri.org/gene_exp_web/) identified probeset OS015607_at (e⁻¹³⁵ expectation value) as the closest match. Gene expression experiments indicated that this gene is induced by the fungal pathogen M. grisea.

[0591] The bait fragment encoding amino acids 1 to 308 of OsPP2A-2 (which includes the serine/threonine protein phosphatase signature of OsPP2A-2) was also found to interact with a novel protein (23268), an enzyme similar to phosphoribosylanthranilate transferase that is likely involved in the plant response to pathogen infection. The novel protein, which was named OsPN23268, is similar to anthranilate phosphoribosyltransferase, a chloroplast precursor. Two prey clones encoding amino acids 12 to 200 of novel protein OsPN23268 were retrieved from the input trait library.

[0592] OsPN23268 is a novel 320-amino acid protein with a possible cleavage site between amino acids 43 and 44, although there does not appear to be an N-terminal peptide sequence. Analysis of the Os23268 protein sequence detected two domains originally defined in E. coli thymidine phosphorylase (Walter et al., J. Biol. Chem. 265(23): 14016-22, 1990): the glycosyl transferase family, helical bundle domain (amino acids 1 to 61) and a glycosyl transferase family, a/b domain (amino acids 66 to 303). The latter contains a beta-sheet that is splayed open to accommodate a putative phosphate-binding site (Walter et al., J. Biol. Chem. 265(23): 14016-14022, 1990). Two prey clones of OsPN23268 retrieved from the input trait library and found to interact with OsPP2A-2 included sequence encoding amino acids 12 to 200 of novel protein OsPN23268. This sequence of OsPN23268 includes the glycosyl transferase family helical bundle domain and part of the a/b domain.

[0593] The glycosyl transferase family includes thymidine phosphorylase and anthranilate phosphoribosyltransferase enzymes. In mammalian cells, thymidine phosphorylase is identical to the angiogenic factor, platelet-derived endothelial cell growth factor (Morita et al., Curr. Pharm. Biotechnol. 2(3): 257-267, 2001; Browns and Bicknell, Biochem. J. 334(Pt 1): 1-8, 1998), and it also controls the effectiveness of the chemotherapeutic drug capecitabine by converting it to its active form (Ackland and Peters, Drug Resist. Updat. 2(4): 205-214, 1999). As its name indicates, novel protein 23268 is similar to A. thaliana phosphoribosylanthranilate transferase (GENBANK® Accession No. AAB02913.1; 56.6% identity; 5e⁻⁹⁵), an enzyme with a role in the tryptophan biosynthetic pathway which is also found in bacteria (Edwards et al., J. Mol. Biol. 203(2): 523-524, 1988). In A. thaliana, this tryptophan biosynthetic enzyme is synthesized as a higher-molecular-weight precursor and then imported into chloroplasts to be processed into its mature form (Zhao and Last, J. Biol. Chem. 270(11): 6081-6087, 1995). The A. thaliana anthranilate phosphoribosyltransferase is also similar to DESCA11 (GENBANK® Accession No. BI534445; e⁻¹⁷), one of the genes identified in Chenopodium amaranticolor (a plant with broad-spectrum virus resistance) which are induced during the hypersensitive response (HR) response of the plant subsequent to infection with tobacco mosaic virus and tobacco rattle tobravirus (Cooper, B., Plant J. 26(3): 339-349, 2001).

[0594] A BLAST analysis comparing the nucleotide sequence of OsPN23268 against TMRI's GENECHIP® Rice Genome Array sequence database identified probeset OS015603_s_at (3e⁻⁴¹ expectation value) as the closest match. Our gene expression experiments indicate that this gene is induced by the fungal pathogen M. grisea.

[0595] The bait fragment of OsPP2A-2 containing amino acids 150 to 308 was also found to interact with the seed storage protein glutelin CAA33838 (OsCAA33838). Glutelin CAA33838 is the major seed storage protein in rice. Its cDNA sequence was identified by Wen et al., Nucleic Acids Res. 17(22): 9490, 1989, and the accumulation of the protein in rice endosperm occurs between five and seven days after flowering (Udaka et al, J. Nutr. Sci. Vitaminol. (Tokyo) 46(2): 84-90, 2000). One prey clone encoding amino acids 5 to 155 of OsCAA33838 was retrieved from the output trait library. OsCAA33838 (GENBANK® Accession No. X15833) is a 499-amino acid protein that includes a cleavable signal peptide (amino acids 1 to 24), as determined by analysis of the amino acid sequence. The analysis identified an 11S plant seed storage protein domain (amino acids 1 to 469; 1e 243). The 11S plant seed storage proteins tend to be glycosylated proteins that form hexameric structures. They are composed of two peptides linked by disulfide bonds and are also members of the cupin superfamily of proteins by virtue of their two beta-barrel domains. The analysis also detected this domain but localized it to a narrower region (amino acids 302 to 324). In addition, a 7S seed storage protein, C-terminal domain (amino acids 319 to 478; 602e⁻⁰⁴), was identified which is also found in members of the cumin superfamily. In agreement with the evidence that OsCAA33838 is a glycosylated protein, an N-glycosylation site (amino acids 491 to 494) was identified.

[0596] A BLAST analysis comparing the nucleotide sequence of OsCAA33838 against TMRI's GENECHIP® Rice Genome Array sequence database identified probeset OS000688.1_at (e=0 expectation value) as the closest match. Our gene expression experiments indicate that this gene is not specifically expressed in several different tissue types and is not specifically induced by a broad range of plant stresses, herbicides and applied hormones.

[0597] The bait fragment of OsPP2A-2 was also found to interact with novel protein PN26645, a putative protein disulfide isomerase-related protein precursor (also called OsPN26645). The bait fragment used in this search encodes amino acids 1 to 308 of OsPP2A-2, which includes the serine/threonine protein phosphatase signature of OsPP2A-2. One prey clone encoding amino acids 24 to 164 of OsPN26645 was retrieved from the input trait library. OsPN26645 is a 311-amino acid protein that includes a cleavable signal peptide (amino acids 1 to 17) and a predicted transmembrane domain (amino acids 210 to 226), as determined by analysis of the amino acid sequence. A BLAST analysis against the Genpept database revealed that OsPN26645 is similar to an A. thaliana protein (GENBANK® Accession No. BAB09470.1; 32.8% identity; e⁻²⁸) that is similar to the rat protein disulfide isomerase-related protein precursor (GENBANK® Accession No.: gi5668777, 46% identity, 1e⁻⁶³). As its name indicates, disulfide isomerase catalyzes the formation of disulfide bonds. This enzyme can therefore be important for proper protein folding. In mammals, disulfide isomerase in the lumen of the endoplasmic reticulum creates disulfide bonds in secretory and cell-surface proteins, and microsomes deficient in this enzyme are unable to conduct cotranslational formation of disulphide bonds (Bulledi and Freedman, Nature 335(6191): 649-651, 1988). Although the activity of this enzyme is not as well characterized in plants, it is likely that it serves in a similar capacity.

[0598] A BLAST analysis comparing the nucleotide sequence of OsPN26645 against TMRI's GENECHIP® Rice Genome Array sequence database identified probeset OS002485.1_at (e⁻¹⁰⁵ expectation value) as the closest match. Gene expression experiments indicated that this gene is not specifically expressed in several different tissue types and is not specifically induced by a broad range of plant stresses, herbicides and applied hormones.

[0599] The bait fragment of OsPP2A-2 was also found to interact with novel protein PN24162 (OsPN24162), a porin-like, voltage-dependent anion channel protein. The bait fragment used in this search encodes amino acids 150 to 308 of OsPP2A-2. One prey clone encoding amino acids 28 to 164 of OsPN24162 was retrieved from the output trait library. BLAST analysis of the OsPN24162 amino acid sequence indicated that this protein is most similar to a porin-like protein from A. thaliana (GENBANK® Accession No. NP_{—}201551; 53% amino acid sequence identity; 3e⁻⁸⁶). OsPN24162 is also similar to a rice mitochondrial voltage-dependent anion channel (GENBANK® Accession No. Y18104; 44% identity; 2e⁶¹), a 274-amino acid protein encoded by a cDNA found to belong to a small multigene family in the rice genome (Roosens et al., Biochim. Biophys. Acta 1463(2): 470-476, 2000). Expression of this gene was found to be regulated in function of the plantlets maturation and organs, and not responsive to osmotic stress (Roosens et al., supra). Mitochondrial voltage-dependent ion channels are also called mitochondrial porins by analogy with the proteins forming pores in the outer membrane of Gram-negative bacteria.

[0600] A BLAST analysis comparing the nucleotide sequence of OsPN24162 against TMRI's GENECHIP® Rice Genome Array sequence database identified probeset OS007036.1_at (e⁻⁶⁵ expectation value) as the closest match. Our gene expression experiments indicate that this gene is not specifically expressed in several different tissue types and is not specifically induced by a broad range of plant stresses, herbicides and applied hormones.

[0601] The bait fragment of OsPP2A-2 was also found to interact with search a DnaJ-like protein with a putative role in the pathogen-induced defense response. The bait fragment used in this search encodes amino acids 150 to 308 of OsPP2A-2. One prey clone encoding amino acids 99 to 368 of Os011994-D16 was retrieved from the output trait library. This new protein was named 011994-D16 or, because it was identified from O. sativa, Os011994-D16.

[0602] BLAST analysis of the Os011994-D16 amino acid sequence indicated that this protein is similar to maize (Zea mays) DnaJ protein homolog ZMDJ1 (GENBANK® Accession No. T01643; 84% identity; e=0). In eukaryotic cells, DnaJ-like proteins regulate the chaperone (protein folding) function of Hsp70 heat-shock proteins through direct interaction of different Hsp70 and DnaJ-like protein pairs (Cyr et al., Trends Biochem. Sci. 19(4): 176-181, 1994). Heat shock proteins (reviewed in Bierkens et al., Toxicology 153(1-3): 61-72, 2000) are stress proteins which function as intracellular chaperones to facilitate protein folding and assembly and which are selectively expressed in plant cells in response to a range of stimuli, including heat and a variety of chemicals. As regulators of heat shock proteins, DnaJ-like proteins are thus part of the plant protective stress response.

[0603] A BLAST analysis comparing the nucleotide sequence of Os011994-D16 against TMRI's GENECHIP® Rice Genome Array sequence database identified probeset OS009139.1_at (e=0 expectation value) as the closest match. Gene expression experiments indicated that expression of this gene is repressed by the plant hormone jasmonic acid.

Yeast Two-Hybrid Using O. sativa Chilling-Inducible Protein CAA90866 (OsCAA90866) as Bait

[0604] The bait protein, namely O. sativa chilling-inducible protein CAA90866 (OsCAA90866), is a 379-amino acid protein encoded by a complete cDNA sequence related to chilling tolerance in rice. BLAST analysis indicated that OsCAA90866 is similar to the same PP2A regulatory subunit from A. thaliana (GENBANK® Accession No. AAD39930; 35% amino acid sequence identity; e⁻⁵⁷ expectation value) that was found similar to OsORF020300-223, interactor for the bait protein PP2A-2 (see Example III, page). A BLAST analysis comparing the nucleotide sequence of the chilling-inducible protein against TMRI's GENECHIP® Rice Genome Array sequence database identified probeset OS015052 at (4e⁻⁷⁸ expectation value) as the closest match. Gene expression experiments indicated that this gene is induced by cold stress.

[0605] As described in Table 32, a bait clone encoding amino acids 100 to 250 of O. sativa Chilling-inducible Protein CAA90866 (OsCAA90866) was found to interact with a prey clone encoding amino acids 1 to 126 of the same protein retrieved from the output trait library.

[0606] In addition, the bait clone encoding amino acids 100 to 250 of O. sativa Chilling-Inducible Protein CAA90866 (OsCAA90866) was found to interact with Os008938-3209. Four prey clones encoding amino acids 53-259 of Os008938-3209 were retrieved from the input trait library. Os008938-3209 is a 260-amino acid protein that includes a 14-3-3 protein signature 1 (amino acids 48-60) and a 14-3-3 protein signature 2 (amino acids 220 to 260), which suggests that Os008938-3209 is a member of the 14-3-3 family. BLAST analysis indicated that the amino acid sequence of Os008938-3209 shares 100% identity with that of rice putative 14-3-3 protein (GENBANK® Accession No. AAK38492, 8e⁻¹⁴⁵). The 14-3-3 proteins interact with regulators of cellular signaling, cell cycle regulation, and apoptosis. They are thought to act as molecular scaffolds or chaperones and to regulate the cytoplasmic and nuclear localization of proteins with which they interact by regulating their nuclear import/export Zilliacus et al., Mol. Endocrinol. 15(4): 501-511, 2001); reviewed by Muslin et al., Cell Signal 12(11-12): 703-709, 2000. Since 14-3-3 proteins participate in protein complexes within the nucleus (Imhof and Wolffe, Biochemistry 38(40): 13085-13093, 1999; Zilliacus et al., supra), cytoplasm (De Lille et al., Plant Physiol. 126(1): 35-38, 2001), mitochondria (De Lille et al., supra) and chloroplast (Sehnke et al., Plant Physiol. 122(1): 235-242, 2000), additional information would be necessary to determine where Os008938-3209 resides within the cell. Cellular localization of this prey protein could lead to a better interpretation of the significance of its interaction with chilling-inducible protein CAA90866.

[0607] A BLAST analysis comparing the nucleotide sequence of the Os008938-3209 protein against TMRI's GENECHIP® Rice Genome Array sequence database identified probeset OS008938_s_at (e⁻⁶¹ expectation value) as the closest match. Gene expression experiments indicated that this gene is induced by salicylic acid, ABA, BAP, BL2, and 2,4D, during cold stress, and under drought conditions.

[0608] In addition, the bait clone encoding amino acids 100 to 250 of O. sativa Chilling-inducible Protein CAA90866 (OsCAA90866) was found to interact with OsAAG46136, a pyrrolidone carboxyl peptidase from O. sativa. Two prey clones encoding amino acids 92-222 of OsAAG46136 were retrieved from the input trait library. These clones include the pyroglutamyl peptidase I motif of OsAAG46136.

[0609] OsAAG46136 is a 222-amino acid protein that contains a pyroglutamyl peptidase I motif (amino acids 11 to 221). This motif is found in the N-terminal regions of peptide hormones (including thyrotropin-releasing hormone and luteinizing hormone releasing hormone), and it confers protease resistance to the protein (Odagaki et al., Structure Fold Des. 7(4): 399-411, 1999). BLAST analysis indicated that the amino acid sequence of OsAAG46136 shares 100% identity with that of rice putative pyrrolidone carboxyl peptidase (GENBANK® Accession No. AAG46136; 4e⁻¹²⁶). OsAAG46136 is also similar to two unknown proteins from A. thaliana (GENBANK® Accession Nos. NP_{—}176063, 8e⁻⁰⁸⁰ and AAK25976.1, e⁻⁰⁷⁶, both not described in the literature. The similarity of OsAAG46136 to pyrrolidone carboxyl peptidase gives some suggestion as to the function of this poorly defined rice protein. Pyrrolidone carboxyl peptidase (Pcps) is an enzyme that removes an N-terminal pyroglutamyl group from some proteins. It is present in many species (reviewed by Awade et al., Proteins 20(1): 34-51, 1994) and is a valuable tool for bacterial diagnosis (most of the literature describing this protein addresses bacterial homologs). The active site of the Pseudomonas fluorescens Pcps has been characterized and the nature of this site (Cys-144 and His-166 are necessary for activity) suggests that it can represent a new class of thiol aminopeptidases (Le Saux et al., J. Bacteriol. 178(11): 3308-3313, 1996). Peptidases in this protein family are necessary for processing and activation of important bioactive peptides including amyloid precursor protein (APP), strongly implicated in Alzheimer's disease (Lefterov et al., FASEB J. 14(12): 1837-1847, 2000). Furthermore, this enzyme deaminates and thus inactivates the glycopeptide anticancer agent bleomycin (Schwartz et al., Proc. Natl. Acad. Sci. USA 96(8): 4680-4685, 1999).

[0610] A BLAST analysis comparing the nucleotide sequence of OsAAG46136 against TMRI's GENECHIP® Rice Genome Array sequence database identified probeset OS013894_s_at (e⁻⁸ expectation value) as the closest match. The expectation value is too low for this probeset to be a reliable indicator of the gene expression of OsAAG46136.

[0611] The bait clone encoding amino acids 100 to 250 of O. sativa Chilling-Inducible Protein CAA90866 (OsCAA90866) was also found to interact with protein ORF020300-2233.2 (OsORF020300-223), having a putative PP2A regulatory subunit and being similar to OsCAA90866 (see description in Example III). Three prey clones encoding amino acids 1 to 206 and three prey clones encoding amino acids 1-190 of OsORF020300-223 were retrieved from the output trait library.

[0612] Additionally, the bait clone encoding amino acids 100 to 250 of O. sativa Chilling-Inducible Protein CAA90866 (OsCAA90866) was found to interact with protein PN23045 (OsPN23045). Two prey clones encoding amino acids 240 to 287 of OsPN23045 were retrieved from the input trait library.

[0613] OsPN23045 is a 287-amino acid protein that includes an inositol P domain (amino acids 233 to 272). This domain was identified in bovine inositol polyphosphate 1-phosphatase protein, which is involved in signal transduction (see York et al., Biochemistry 33(45): 13164-13171, 1994). Mikami et al. showed that phosphatidylinositol-4-phosphate 5-kinase (AtPIP5K11) is induced by water stress and abscisic acid (ABA) in A. thaliana, suggesting a link between phosphoinositide signaling cascades with water-stress responses in plants (Mikami et al., Plant J. 15(4): 563-568, 1998). Xiong et al. reported that FRY1, a mutant gene in A. thaliana encoding an inositol polyphosphate 1-phosphatase, is a negative regulator of ABA and stress signaling in this plant (Xiong et al., Genes Dev. 15(15): 1971-1984, 2001), providing evidence that phosphoinositols mediate ABA and stress signal transduction in plants.

[0614] A BLAST analysis comparing the nucleotide sequence of OsPN23045 against TMRI's GENECHIP® Rice Genome Array sequence database identified probeset OS006742.1_at (e=0 expectation value) as the closest match. Gene expression experiments indicated that this gene is specifically expressed in leaf and stem.

[0615] The bait clone encoding amino acids 100 to 250 of O. sativa Chilling-Inducible Protein CAA90866 (OsCAA90866) was also found to interact with protein PN23225, which is a novel 792-amino acid protein similar to T. aestivum initiation factor (iso)4f p82 subunit (p82) (GENBANK® Accession No. AAA74724; 69.6% amino acid sequence identity; e=0). One prey clone encoding amino acids 639 to 792 of OsPN23225 was retrieved from the input trait library. The wheat protein contains possible motifs for ATP binding, metal binding, and phosphorylation (Allen et al., J. Biol. Chem. 267(32): 23232-23236, 1992). OsPN23225 contains an MIF4G domain (amino acids 207 to 434) named after Middle domain of eukaryotic initiation factor 4G (eIF4G), and an MA3 domain (amino acids 627 to 739) also found in eIF proteins (Ponting, C. P., Trends Biochem. Sci. 25(9): 423-426, 2000). These domains are found in molecules that participate in mRNA decay pathways. Although the function of the bait chilling-inducible protein CAA90866 is not well defined, it appears to be a nuclear protein and its interaction with the eIF-like protein OsPN23225 supports the notion that CAA90866 participates in the rice transcriptional machinery. The identification of the OsPN23225 prey protein likely represents the discovery of a novel rice eIF.

[0616] A BLAST analysis comparing the nucleotide sequence of OsPN23225 against TMRI's GENECHIP® Rice Genome Array sequence database identified probeset OS003249_at (e⁻¹⁷ expectation value) as the closest match. The expectation value is too low for this probeset to be a reliable indicator of the gene expression of OsPN23225.

[0617] The bait clone encoding amino acids 100 to 250 of O. sativa Chilling-Inducible Protein CAA90866 (OsCAA90866) was also found to interact with OsPN29883, a 340-amino acid fragment that is similar to A. thaliana putative 2-dehydro-3-deoxyphosphooctonate aldolase (GENBANK® Accession No. NP_{—}178068; 3e⁻¹⁴² expectation value) and pea (Pisum sativum) 2-dehydro-3-deoxyphosphooctonate aldolase (Kdo8P synthase) (GENBANK® Accession No. 050044; 3e⁻¹⁴² expectation value). One prey clone encoding amino acids 58 to 175 of OsPN29883 was retrieved from the output trait library. Kdo8P synthase in pea catalyzes the biosynthesis of Kdo-8-P, a component of lipopolysaccharide of plant cell walls, with high structural and functional similarities to enterobacterial Kdo8P synthase (Brabetz et al., Planta 212(1): 136-143, 2000).

Summary

[0618] The interactors identified for the OsPP2A-2 bait protein (i.e., proteins that bind to OsPP2A-2) comprise a network that is speculated to be associated with the plant defense response to pathogens. Among the five novel rice proteins identified as interactors for OsPP2A-2, Os23268 is similar to the A. thaliana tryptophan biosynthetic enzyme anthranilate phosphoribosyltransferase. This enzyme is encoded by a gene that is similar to the DESCA11 gene involved in resistance to virus infection (Cooper, B., Plant J. 26(3): 339-49, 2001). While the role of tryptophan in disease resistance is unknown, tryptophan is used in the biosynthesis of indol-3-acetic acid, a plant hormone and signaling molecule. Tryptophan can thus have a role in modulation of gene expression in plants. Moreover, the glycosyl transferase function in Os23268 can be associated with disease resistance signaling pathways or with phytoalexin cellular distribution. Phytoalexins are low-molecular-weight antimicrobial compounds that accumulate in plants as a result of infection or stress, and the rapidity of their accumulation is associated with resistance in plants to diseases caused by fungi and bacteria. Taken altogether, these data suggest that anthranilate phosphoribosyltransferases plays a role in the plant response to pathogen infection. Moreover, gene expression experiments confirmed that this gene is induced by the fungal pathogen M. grisea. Thus, the anthranilate phosphoribosyltransferase-like novel protein Os23268 is believed to be involved in the signaling and regulation pathways that mediate the response of rice to biotic stress.

[0619] Novel protein Os011994-D16, similar to DnaJ protein, is another interactor for OsPP2A-2 with a likely role in the pathogen-induced defense response. DnaJ-like proteins are known to be regulators of heat shock proteins and are thus part of the plant protective stress response. Gene expression experiments support this notion, indicating that the gene encoding the DnaJ-like protein of this Example is repressed by jasmonic acid, a component of signaling networks that provide the specificity of plant pathogen-induced defense responses (reviewed in Nurnberger and Scheel, Trends Plant Sci. 6(8): 372-379, 2001).

[0620] OsPP2A-2 was also found to interact with the novel protein OsORF020300-2233.2, which is similar to A. thaliana PP2A regulatory subunit and to rice chilling inducible protein CAA90866 (OsCAA90866) (the second bait protein of this Example). The similarity of OsORF020300-223 to PP2A regulatory subunit validates its interaction with the PP2A-2 catalytic subunit, this interaction being consistent with the subunit composition of PP2A enzymes (Awotunde et al., Biochim Biophys Acta 1480(1-2): 65-76, 2000). The OsORF020300-223-OsPP2A-2 interaction suggests that OsORF020300-223 participates in signaling events that involve OsPP2A-2 enzymatic activity, and the similarity of OsORF020300-223 to rice chilling-inducible protein OsCAA90866 suggests that cold tolerance can involve one of these signaling events.

[0621] OsPP2A-2 was also found to interact with rice putative proline-rich protein OsAAK63900. Though it has no known DNA-binding motif, there are indications that OsAAK63900 can play a role as a transcriptional regulator. It has an HLH domain common to transcription factors, although this domain mediates protein dimerization only. It also has a gntR family signature common to bacterial DNA-binding transcriptional regulators, although the function of this domain is not known. The existence of the Ole e I suggests that OsPP2-2 can dephosphorylate OsAAK69300, thus regulating its function as a pollen protein, although the lack of data on the Ole e I signature function makes this possibility more difficult to argue. Evidence also exists that PP2A proteins regulate the DNA-binding activity of transcription factors in plants Vazquez-Tello et al., Mol. Gen. Genet. 257(2): 157-166, 1998) and mammalian cells (Wadzinski et al., Mol. Cell Biol. 13(5): 2822-2834, 1993). Therefore, it is most likely that the OsPP2A-2-OsAAK63900 interaction occurs in the nucleus and that it plays a role in regulating transcriptional events in rice.

[0622] Other proteins found to interact with OsPP2A-2 include a disulfide isomerase with a putative role in protein folding (novel protein OsPN26645), a voltage-dependent ion channel protein (novel protein OsPN24162) and the seed storage protein glutelin (OsCAA33838). The biological significance of these interactions is unclear. Analysis of the amino acid sequence of glutelin identified several protein kinase C and casein kinase II phosphorylation sites. It is possible that the phosphorylation state of glutelin determines its function or stability, and its interaction with OsPP2A-2 can occur during dephosphorylation of glutelin. Alternatively, this interaction can result in localization of OsPP2A-2 and thereby affect events downstream of OsPP2A-2-dependent dephosphorylation. Given the presence of a disulfide bond between the two peptide chains of typical plant seed storage proteins, it is interesting that OsPP2A-2 also interacts with a putative protein disulfide isomerase (OsPN26645). Perhaps OsPP2A-2 interacts with other enzymes to create a co-translational modification complex. Additional yeast-two-hybrid data can clarify the purpose of these interactions. However, given the association of PP2A with other proteins involved in biotic stress responses, the aforementioned associations could also be involved in biotic stress responses.

[0623] The chilling-inducible protein CAA90866 was found to interact with itself and with six proteins. These proteins are speculated to interact as components of a network of proteins relevant to the rice response to cold stress. This hypothesis finds support in gene expression experiments, which confirmed that the gene encoding the chilling-inducible protein is induced by cold. One of the interactors is the putative 14-3-3 protein Os008938-3209. The relationship to chilling tolerance of the bait protein OsCAA90866 suggests that its interaction with Os008938-3209 can be associated with cold tolerance. Gene expression experiments showed that this protein is induced under a broad range of stress conditions. Its activation probably allows its interaction with a number of stress proteins. Given the function of 14-3-3 proteins as molecular chaperones, Os008938-3209 can act as a molecular glue for these interactions to preserve protein complex stability in membranes, or it can coordinate interactions involving transcription factors associated with stress genes. Subcellular localization of Os008938-3209 can further clarify the significance of its interaction with OsCAA90866.

[0624] Another interactor for OsCAA90866 is a pyrrolidone carboxyl peptidase-like protein (OsAAG46136). The putative pyrrolidone carboxyl peptidase function of OsAAG46136 suggests that it participates in processing and/or activation of substrate proteins, and these proteins can be important to the plant response to chilling. Peptidase activity has been associated with regulation of signaling. Carboxypeptidases, for instance, hydrolytically remove the pyroglutamyl group from peptide hormones, thereby activating these signaling molecules. A carboxypeptidase regulates Brassinosteroid-insensitive 1 (BRI1) signaling in A. thaliana by proteolytic processing of a protein (Li et al., Proc. Natl. Acad. Sci. USA 98(10): 5916-5921, 2001). Based on its ability to interact with chilling-inducible protein and on the role of the latter in chilling tolerance, it is speculated that the carboxypeptidase-like protein OsAAG46136 can have a role in activating signaling molecules/hormonal peptides that are involved in the plant response to cold stress.

[0625] The interactions of OsCAA90866 with OsPN23045, a protein with a putative inositol phosphate function, and with OsPN23225, a rice homolog of wheat initiation factor (iso)4f p82 subunit, provide further insight into the function of the bait protein. Phosphoinositols are known to mediate ABA and stress signal transduction in plants (Mikami et al., Plant J. 15(4): 563-568, 1998; Xiong et al., Genes Dev. 15(15): 1971-1984, 2001). The putative inositol phosphatase protein OsPN23045 can function in a similar way and its interaction with the chilling-inducible protein can be associated with regulation of cell signaling events that relate to cold tolerance. The prey protein OsPN23225 likely represents a novel rice eIF. The eIF proteins have a role in RNA processing pathways (Ponting C. P., Trends Biochem. Sci. 25(9): 423-426, 2000) and stress is typically associated with an abundance of RNA transcripts. Based on this information and on the relationship that CAA90866 has to chilling tolerance, the OsCA90866-PN23225 interaction is speculated to control translational events related to cold stress.

[0626] Finally, OsCAA90866 interacts with and is similar to the same putative PP2A regulatory subunit protein OsORF020300-223 found to interact with the bait protein OsPP2A-2. This interaction provides a link between the two networks of this Example and suggests the involvement of OsPP2A-2 in both biotic and abiotic stress response pathways (see diagram in Appendix 1). Based on the observed interactions and on sequence similarities among the proteins involved in these interactions, OsPP2A-2 appears to regulate both biotic and abiotic stress response pathways. Thus, the two pathways, though independent, are speculated to be linked through protein phosphatases, and that these enzymes likely mediate the plant's stress response by dephosphorylation of the proteins participating in these pathways. In this scenario, it is possible that the self-interaction observed for OsCAA90866 participates in the creation of multicomponent phosphatase complexes. Furthermore, the interaction of OsCA90866 with the aldolase-like protein OsPN29883 suggests that the aldolase needs to be dephosphorylated for activation/inactivation, and that this novel protein can have roles during stress responses based upon the other interactions and the gene expression patterns of the chilling-inducible protein.

[0627] Moreover, OsORF020300-223 the A. thaliana regulatory A subunit of protein phosphatase 2A (PP2A-A) has been implicated in the regulation of auxin transport in A. thaliana (Garbers et al., EMBO J. 15(9): 2115-2124, 1996). The phytohormone auxin controls processes such as cell elongation, root hair development and root branching. Since OsORF020300-223 is also similar to and interacts with chilling-inducible protein CAA90866, it is possible that the latter can be involved in auxin transport.

### REFERENCES

[0628] The references listed below as well as all references cited in the specification are incorporated herein by reference to the extent that they supplement, explain, provide a background for or teach methodology, techniques and/or compositions employed herein.
[0629] Aasland et al. (1995) Trends Biochem. Sci. 20: 56-59.
[0630] Abdel-Ghany et al. (2000) DNA Cell Biol. 19: 567-578.
[0631] Abler et al. (1993) Plant Mol. Biol. 22: 1031-1038.
[0632] Ach & Gruissem (1997) Proc. Natl. Acad. Sci. USA 91: 5863-5867.
[0633] Ackland & Peters, (1999) Drug Resist Update 2: 205-214.
[0634] Agrawal S (ed.) (1993) Methods in Molecular Biology, volume 20, Humana Press, Totowa, N.J., United States of America.
[0635] Agueli et al. (2001) Biochem. J. 360: 413-419.
[0636] Aihara et al. (2000) J. Neurochem. 74: 2622-2625.
[0637] Ajuh et al. (2001) J. Biol. Chem. 276: 42370-42381.
[0638] Allen et al. (1992) J. Biol. Chem. 267: 23232-23236.
[0639] Allison et al. (1986) Virology 154:9-20.
[0640] Altschul et al. (1990) J. Mol. Biol. 215:403.
[0641] Altschul et al. (1997) Nucl. Acids Res. 25: 3389.
[0642] An et al. (1985) EMBO J. 4: 277.
[0643] Antoku et al. (2001) Biochem. Biophys. Res. Commun. 286:1003-1010.
[0644] Aoyama & Chua (1997) Plant J 11:605-612.
[0645] Apte et al. (1995) FEBS Lett. 363: 304-306.
[0646] Arino et al. (1993) Plant Mol. Biol. 21: 475-485.
[0647] Arioli et al. (1998) Science 279: 717-720.
[0648] Auch & Reth (1990) Nucl. Acids Res. 18: 6743.
[0649] Austin et al. (2002) Science 295: 2077-2080.
[0650] Ausubel et al. (1988) Current Protocols in Molecular Biology, John Wiley & Sons, New York, N.Y., United States of America.
[0651] Awade et al. (1994) Proteins 20: 34-51.
[0652] Awotunde et al. (2000) Biochim Biophys Acta 1480: 65-76.
[0653] Azevedo et al. (2002) Science 295: 2073-2076.
[0654] Aznar & Lacal (2001) Prog. Nucleic Acid Res. Mol. Biol. 67: 193-234.
[0655] Baluska et al. (2001) Plant Physiol. 126: 39-46.
[0656] Bartel & Fields (eds.), (1997) The Yeast Two-Hybrid System, Oxford Press.
[0657] Bartlett et al. (1982) in Methods in Chloroplast Molecular Biology, (Edelman et al., eds.) Elsevier Biomedical Press, New York, N.Y., United States of America, pp. 1081-1091.
[0658] Baskin et al. (1992) Aust. J. Plant Physiol. 19: 427437.
[0659] Batzer et al. (1991) Nucleic Acid Res. 19:5081.
[0660] Baunsgaard et al. (1998) Plant J. 13: 661.
[0661] Beerli et al. (1998) Proc Natl Acad Sci USA 95:14628-14633.
[0662] Bergeron et al. (1994) Trends Biochem. Sci. 19: 124-128.
[0663] Bertolaet et al. (2001) Nat Struct. Biol. 8: 417-422.
[0664] Bevan (1984) Nucl. Acids Res. 12:8711.
[0665] Bevan et al. (1983) Nature 304:184-187.
[0666] Bezzi et al. (2001) Nat. Neurosci. 4: 702-710.
[0667] Biedenkapp et al. (1988) Nature 335: 835-837.
[0668] Bierkens et al. (2000) Toxicology 153: 61-72.
[0669] Bihn et al. (1997) Plant J. 12: 1439-1445.
[0670] Binet et al. (1991) Plant Mol Biol 17:395-407.
[0671] Bischoffet al. (1994) Proc. Natl. Acad. Sci. USA 91: 2587-2591.
[0672] Bisikirska et al. (1997) Z. Naturforsch 52: 180-186.
[0673] Blochinger & Diggelmann (1984) Mol Cell Biol 4:2929-2931.
[0674] Bolhuis et al. (1998) J. Biol. Chem. 273: 21217-21224.
[0675] Borisjuk et al. (1998) Planta 206: 504-14.
[0676] Bornemann et al. (1996) Biochemistry 35: 9907-9916.
[0677] Bourouis & Jarry (1983) EMBO J 2:1099-1104.
[0678] Brabetz et al. (2000) Planta 212: 136-143.
[0679] Bradwell et al. (1994) Genes Dev. 8: 1664-1677.
[0680] Braun (2001) Plant Physiol. 125:1611-1619.
[0681] Briknarova et al. (2001) Nat. Struct. Biol. 8: 349-352.
[0682] Browns & Bicknell (1998) Biochem. J. 334: 1-8.
[0683] Bruggemann et al. (1996) Plant J 10:755-760.
[0684] Brummelkamp et al. (2002) Science 296: 550-3.
[0685] Brunner et al. (1998) Plant J. 14: 225-34.
[0686] Buchanan et al. (eds.), (2002) Biochemistry and Molecular Biology of Plants, John Wiley & Sons, New York, N.Y., United States of America.
[0687] Buck & Guest (1989) Biochem. J. 260: 737-747.
[0688] Bulledi & Freedman (1988) Nature 335: 649-651.
[0689] Burglin et al. (1997) Nucl. Acids Res. 25: 4173-4180.
[0690] Bursch (2001) Cell Death Differ. 8: 569-81.
[0691] Busch et al. (1990) Trends Genet 6: 36-40.
[0692] Byrne et al. (1987) Plant Cell Tissue Org Culture 8: 3.
[0693] Caddick et al., (1998) Nat Biotechnol 16:177-180.
[0694] Callebaut & Mornon (1997) FEBS Lett. 400: 25-30.
[0695] Callis et al. (1987) Genes Dev. 1: 1183.
[0696] Callis et al., (1990) J Biol Chem 265:12486-12493.
[0697] Cao et al. (2000) Arch Biochem Biophys. 373: 135-46.
[0698] Casas et al., (1993) Proc Natl Acad Sci USA 90:11212-6.
[0699] Cash (1996) Med Hypotheses 47: 455-459.
[0700] Chan et al. (1998) Biochim. Biophys. Acta 1442: 1-19.
[0701] Chee et al. (1989) Plant Physiol. 91:1212.
[0702] Chen et al. (1993) Science 262: 1883-1886.
[0703] Chen et al. (2002) Plant Cell 14: 559-574.
[0704] Chibbar et al., (1993) Plant Cell Rep 12:506-509.
[0705] Choi et al. (1995) Mol Gen, Genet. 246:266.
[0706] Christensen et al., (1989) Plant Mol Biol 12:619-632.
[0707] Christou et al. (1988) Plant Physiol. 87:671.
[0708] Christou et al. (1989) Proc. Natl. Acad. Sci. USA 86:7500.
[0709] Christou et al., (1991) Bio/Technology 9: 957-962.
[0710] Chuang & Meyerowitz, (2000) Proc Natl Acad Sci USA 97:4985-90.
[0711] Chung et al. (1994) Plant Mol. Biol. 26: 657-665.
[0712] Claes et al. (1990) Plant Cell 2: 19-27.
[0713] Close et al. (1989) Plant Mol. Biol. 13: 95-108.
[0714] Comai et al., (1988) J Biol Chem 263:15104-15109.
[0715] Conceicao et al. (1994) Plant 5:493.
[0716] Corpet et al. (1988) Nucl. Acids Res. 16:10881.
[0717] Creighton, (1984) Proteins, WH Freeman & Co., New York, N.Y., United States of America.
[0718] Crossway et al. (1986) Bio/Techniques 4:320.
[0719] Cruz et al. (1998) P. R. Health Sci. J. 17: 323-326.
[0720] Cyr et al. (1994) Trends Biochem. Sc. 19: 176-181.
[0721] Dasgupta et al. (1993) Gene 133: 301.
[0722] Dasso (2000) Cell 104: 321-324.
[0723] Dat et al. (2001) Redox Rep. 6: 37-42.
[0724] Datta et al. (1990) Bio/Technology 8: 736.
[0725] Davies et al. (1996) EMBO J. 15:4330-4343.
[0726] De Block et al. (1989) Plant Physiol. 91:694.
[0727] de Framond, (1991) FEBS Lett 290:103-6.
[0728] Della-Cioppa et al. (1987) Plant Physiol. 84:965.
[0729] De Lille et al. (2001) Plant Physiol. 126: 35-38.
[0730] Denecke et al. (1995) Plant Cell 7: 391-406.
[0731] Doelling et al. (2001) Plant J. 27: 393-405.
[0732] Dong et al., (1996) Mol Breeding 2:267-276.
[0733] Doonan et al. (1997) Curr. Opin. Cell. Biol. 9: 824-830.
[0734] Dunigan & Madlener (1995) Virology 207: 460-466.
[0735] Dure et al. (1989) Plant Mol. Biol. 12: 475-486.
[0736] Dwyer et al. (1996) Biochim Biophys Acta 1289: 231-237.
[0737] Ecker (1995) Science 268: 667-675.
[0738] Ecker & Davis, (1986) Proc Natl Acad Sci USA 83:5372-5376.
[0739] Edwards et al. (1988) J. Mol. Biol. 203: 523-524.
[0740] Elbashir et al. et al., (2001) EMBO J. 20:6877-88.
[0741] Elge et al. (2001) Plant J. 26: 561-571.
[0742] Ellenberger (1994) Curr. Opin. Struct. Biol. 4: 12-21.
[0743] Ellis et al. (1987) EMBO J., 6:3203.
[0744] Elroy-Stein et al. (1989) Proc. Natl. Acad. Sci. USA. 86:6126.
[0745] EP 0 120 516
[0746] EP 0 138 341
[0747] EP 0 292 435
[0748] EP 0 295 959
[0749] EP 0 301 749
[0750] EP 0 332 104
[0751] EP 0 332 581
[0752] EP 0 342 926
[0753] EP 0 392 225
[0754] EP 1 116 793
[0755] Everett et al. (1987) Bio/Technology 5:1201.
[0756] Fardel et al. (2001) Toxicology 167: 37-46.
[0757] Feys et al. (2001) EMBO J. 20: 5400-5411.
[0758] Fire et al. (1998) Nature 391: 806-811.
[0759] Firek et al., (1993) Plant Mol Biol 22:129-142.
[0760] Frary et al. (2000) Science 289: 85-88.
[0761] Freier et al., (1986) Proc Natl Acad Sci USA 83:9373-9377.
[0762] Fromental-Ramain et al. (1996) Development 122: 461-472.
[0763] Fromm et al. (1986) Nature 319: 791.
[0764] Fromm et al. (1990) Bio/Technology 8: 833.
[0765] Fromme et al. (2001) Biochim. Biophys Acta 1507: 5-31.
[0766] Fujiyama et al. (2001) J. Comp. Neurol. 435: 379-387.
[0767] Gaedeke et al. (2001) EMBO J. 20: 1875-1887.
[0768] Gallie et al. (1987) Nucl. Acids Res. 15:3257.
[0769] Gallie et al. (1989) Plant Cell 1:301.
[0770] Gallois et al. (1997) Plant J. 11: 1325-1331.
[0771] Garbers et al. (1996) EMBO J. 15: 2115-2124.
[0772] Garcia et al. (1998) Planta 207: 172-80.
[0773] Garcia et al. (2000) Microbes Infect. 2: 401-407.
[0774] Garrel & Campuzano (1991) BioEssays 13: 493-498.
[0775] Gehring (1992) Trends Biochem. Sci. 17: 277-280.
[0776] Gehring & Hiromi (1986) Ann. Rev. Genet. 20: 147-173.
[0777] Gillet et al. (1998) Plant J. 16: 257-262.
[0778] Glazebrook et al. (1996) Genetics 143: 973-982.
[0779] Godwin et al. (1998) Proc. Natl. Acad. Sci. USA 95: 13042-13047.
[0780] Goeddel, (1990) Methods in Enzymology, Volume 185, Academic Press, San Diego, Calif., United States of America.
[0781] Goff (2001) Plant J. 26: 339-349.
[0782] Goff et al. (2002) Science 296: 92-100.
[0783] Gocal et al. (2001) Plant Physiol. 125: 1788-1801.
[0784] Gordon Kamm et al. (1990) Plant Cell 2:603.
[0785] Greco et al. (1997) Mol. Gen. Genet. 253: 615-623.
[0786] Green, (2000) Trends Biochem Sci 25:59-63.
[0787] Green et al., (1986) Ann Rev Biochem 55:569-597.
[0788] Gritz et al. (1983) Gene 25:179.
[0789] Grotewold et al. (1991) Proc. Natl. Acad. Sci. USA 88: 4587-4591.
[0790] Groves, et al. (1999) Curr. Opin. Struct. Biol. 9: 383-389.
[0791] Gruber et al. (1993) Vectors for Plant Transformation, in Methods in Plant Molecular Biology, Glich et al. eds, pp. 89-119, CRC Press.
[0792] Guan & Scandalios (1996) J. Mol. Evol. 42: 570-579.
[0793] Guo et al. (2000) EMBO J. 19: 6891-6899.
[0794] Gyuris et al. (1993) Cell 1993, 75: 791-803.
[0795] Hake et al. (1995) Philos Trans. R Soc. Lond. B Biol. Sci. 350: 45-51.
[0796] Hammerschmidt (1999) Ann. Rev. Phytopathol. 37: 285-306.
[0797] Hannig et al. (1995) Bioessays 17: 915-919.
[0798] Haraven et al. (1996) Cell 84: 73544.
[0799] Harlow & Lane, (1988) Antibodies: A Laboratory Manual, Cold Spring Harbor Laboratory Press, Cold Spring Harbor, N.Y., United States of America.
[0800] Harper et al. (1991) Science 252: 951-954.
[0801] Harris et al. (1999) Plant Physiol. 121: 609-617.
[0802] Hartwig (1995) Protein Profile 2: 703-800.
[0803] Hassan et al. (1995) Biochem. Biophys. Res. Commun. 211: 54-49.
[0804] Hatzfeld (1999) Int. Rev. Cytol. 186: 179-224.
[0805] Hayashi et al. (2001) J. Biol. Chem. 276: 43400-43406.
[0806] Haydon & Guest (1991) FEMS Microbiol. Lett. 79: 291-296.
[0807] Hedden & Kamiya (1977) Annual Rev. Plant Physiol. Plant Mol. Biol. 48: 431.
[0808] Henikoff & Henikoff (1989) Proc. Natl. Acad. Sci. USA, 89:10915.
[0809] Hiei et al. (1994) Plant J. 6:271.
[0810] Hiei et al., (1997) Plant Mol Biol 35:205-18.
[0811] Higgins et al. (1988) Gene 73:237.
[0812] Higgins et al. (1989) CABIOS 5:151.
[0813] Higo & Higo (1996) Plant Mol. Biol. 30: 505-521.
[0814] Hinchee et al. (1988) Bio/Technology 6:915.
[0815] Hoekema (1985) in The Binary Plant Vector System, Offset-drukkerij Kanters B.V.
[0816] Holk et al. (1996) Plant Mol. Biol. 31: 1153-1161.
[0817] Hong et al. (2001) Plant Cell 13: 755-768.
[0818] Huang et al. (1992) CABIOS 8:155.
[0819] Huang et al. (1996) Plant Mol. Biol. 33:125.
[0820] Huber et al. (1997) Cell 90: 871-882.
[0821] Hudspeth & Grula, (1989) Plant Molec Biol 12:579-589.
[0822] Hurst (1995) Protein Prof. 2: 105-168.
[0823] Imhof & Wolffe (1999) Biochemistry 38: 13085-13093.
[0824] Ishikawa et al. (2001) Plant J. 27: 89-99.
[0825] Janssens & Goris (2001) Biochem J. 353:417-439.
[0826] Jasencakova et al. (2001) Chromosoma 110: 83-92.
[0827] Jasinski et al. (2001) Plant Cell 13: 1095-107.
[0828] Jia et al. (2000) Plant Sci. 155:115-122.
[0829] Jin & Martin (1999) Plant Mol. Biol. 4: 577-585.
[0830] Jobling & Gehrke (1987) Nature 325:622.
[0831] John et al. (2001) Protoplasma 216:119-142.
[0832] Johnson et al. (1997) J. Biol. Chem. 272: 7106-7113.
[0833] Jorgensen et al., (1996) Plant Mol Biol 31:957-973.
[0834] Josefsson et al. (1987) J. Biol. Chem. 262:12196.
[0835] Kagedal et al. (2001) Biochem J. 359: 335-343.
[0836] Kaitna et al. (2000) Curr. Biol. 10:1172-1181.
[0837] Kang et al. (1995) Plant Mol. Biol. 29:1-10.
[0838] Kang et al. (1997) Mol. Cells 7: 45-51.
[0839] Kao et al. (2000) Biochem. Biophys. Res. Commun. 267: 201-207.
[0840] Karlin & Altschul (1990) Proc. Natl. Acad. Sci. USA 87:2264.
[0841] Karlin & Altschul (1993) Proc. Natl. Acad. Sci. USA 90:5873.
[0842] Kato & Dang (1992) FASEB J. 6: 3065-3072.
[0843] Kawalleck et al. (1992) Proc. Natl. Acad. Sci. USA 89:4713-7.
[0844] Keegan et al., (1986) Science 231:699-704.
[0845] Kehres et al. (1998) Microb. Comp. Genomics 3: 151-169.
[0846] Kelly (1999) Altem. Med. Rev. 4: 249-265.
[0847] Kempin et al., (1997) Nature 389:802-803.
[0848] Kerstetter et al. (1997) Development 124: 3045-3054.
[0849] Kidou et al. (1993) FEBS Lett. 332: 282-286.
[0850] Kim et al. (2001) Plant Physiol. 127:1243-1255.
[0851] Kitade et al. (1999) Nucl. Acids Symp. Ser. 42: 25-26.
[0852] Klein et al. (1988) Bio/technology 6:559.
[0853] Kline et al. (1987) Nature 327:70.
[0854] Knauf et al. (1983) Analysis of Host Range Expression by Agrobacterium, in Molecular Genetics of the Bacteria-Plant Interaction, Puhler, (ed.), Springer-Verlag.
[0855] Kobe et al. (1994) Trends Biochem. Sci. 19: 415-421.
[0856] Kong & Steinbiss (1998) Arch Virol 143:1791-1799.
[0857] Koonin (1993) J. Mol. Biol. 229: 1165-1174.
[0858] Korfhage et al. (1994) Plant Cell 6: 695-708.
[0859] Kossman & Lloyd (2000) Crit. Rev. Biochem. Mol. Biol. 35:141-196.
[0860] Kostyal et al. (1998) Clin. Exp. Immunol. 112: 355-362.
[0861] Kosugi & Ohashi (2002) Plant Physiol. 128: 833-843.
[0862] Koziel et al. (1993) Biotechnology 11:194.
[0863] Krause et al. (1990) Cell 63: 907-919.
[0864] Kruse et al. (1995) Planta 196: 796-803.
[0865] Kyozuka et al. (2000) Plant Cell Physiol. 41:710-718.
[0866] Kyte & Doolittle, (1982) J Mol Biol 157:105-132.
[0867] Lacombe et al. (2001) Science 292: 1486-1487.
[0868] Lamb & Dixon (1997) Ann. Rev. Plant Biol. 48: 251.
[0869] Landolt (1986) Biosystematic Investigation on the Family of Duckweeds: The family of Lemnaceae—A Monograph Study, Geobatanischen Institut ETH, Stiftung Rubel, Zurich.
[0870] Landschulz et al. (1988) Science 240: 1759-1764.
[0871] Langenkamper et al. (2001) J. Exp. Bot 52: 1545-1554.
[0872] Laursen et al. (1994) Plant Mol. Biol. 24:51.
[0873] Lebel et al., (1998) Plant J 16:223-233.
[0874] Lechner et al. (1996) Biochim Biophys Acta 1296: 181-188.
[0875] Lee et al. (1994) Plant Mol. Biol. 26:1981.
[0876] Lefterov et al. (2000) FASEB J. 14: 1837-1847.
[0877] Lenny et al. (1997) Mol. Biol. Rep. 24: 157-168.
[0878] Le Saux et al. (1996) J. Bacteriol. 178: 3308-3313.
[0879] Leslie et al. (2001) Toxicology 167: 3-23.
[0880] Levine et al., (1994) Cell 79: 583-593.
[0881] Li & Komatsu (2000) Eur. J. Biochem. 267: 737-745.
[0882] Li & Nam (2002) Science 295:1299-1301.
[0883] Li et al. (2001) Proc. Natl. Acad. Sci. USA 98: 5916-5921.
[0884] Lim et al. (1999) Plant Physiol. 120: 1193-1204.
[0885] Lim et al. (2000) Plant Mol. Biol. 44: 513-527.
[0886] Lincoln et al. (1994) Plant Cell 6: 1859-1876.
[0887] Lindholm et al. (2000) Mech. Dev. 93: 169-173.
[0888] Lindsey et al. (1993) Transgen. Res. 2: 3347.
[0889] Liu et al. (1992) Antiviral Res. 19: 247-265.
[0890] Liu et al., (1999) Genome Res 9:859-867.
[0891] Logemann et al., (1989) Plant Cell 1:151-158.
[0892] Lommel et al. (1991) Virology 181:382.
[0893] Lopez-Dee et al. (1999) Dev. Genet. 25: 237-244.
[0894] Lorz et al. (1985) Mol. Gen. Genet. 199: 178.
[0895] Ma et al. (1988) Nature 334: 631.
[0896] Macejak & Sarnow, (1991) Nature 353:90-94.
[0897] Magyar et al. (2000) FEBS Left. 486: 79-87.
[0898] Maki et al. (1993) Methods in Plant Molecular Biology, Glich et al. eds, pp. 67-88, CRC Press.
[0899] Malz & Sauter (1999) Plant Mol. Biol. 40: 985-995.
[0900] Manjunath et al. (1997) Plant Mol. Biol. 33:97.
[0901] Mann & Affolter (1998) Curr. Opin. Genet. Dev. 8: 423-429.
[0902] Mannervick (1999) Bioessays 21: 267-270.
[0903] Martinez et al. (1989) J. Mol. Biol. 208:551.
[0904] Martinez et al. (2000) Plant Physiol. 122: 757-766.
[0905] Massey (2000) Biochem. Soc. Trans. 28: 283-296.
[0906] Mayer et al. (2001) Phytochemistry 58: 33-41.
[0907] Mayo, (1987) The Theory of Plant Breeding, Second Edition, Clarendon Press, New York, N.Y., United States of America.
[0908] McBride et al. (1994) Proc. Natl. Acad. Sci. USA 91: 7301.
[0909] McBride et al. (1990) Plant Mol. Biol. 14: 266.
[0910] McCabe et al. (1988) Bio/Technology 6:923.
[0911] McElroy et al., (1990) Plant Cell 2:163-71.
[0912] McEwen, et al. (2001) Mol. Biol. Cell. 12: 2776-89.
[0913] McLeod (1986) Bioessays 6: 208-212.
[0914] Medina et al. (2001) Plant Physiol. 125: 1655.
[0915] Merkle et al. (1994) Plant J. 6: 555-565.
[0916] Messing & Vierra (1982) Gene 19:259.
[0917] Miao & Lam, (1995) Plant J 7:359-365.
[0918] Michalak et al. (1992) Biochem. J. 285: 681-692.
[0919] Michalak et al. (1998) Biochem. Cell. Biol. 76: 779-785.
[0920] Michelis et al. (2000) Plant Mol. Biol. 44: 487-498.
[0921] Mikami et al. (1998) Plant J. 15: 563-568.
[0922] Moon et al. (1999) Plant Physiol. 120: 1193-1204.
[0923] Moons et al. (1998) Plant J. 15: 89-98.
[0924] Morita et al. (2001) Curr. Pharm. Biotechnol. 2: 257-267.
[0925] Muehlbauer et al, (1999) Plant Physiol. 119: 651-62.
[0926] Mukumoto et al., (1993) Plant Mol Biol 23: 995-1003.
[0927] Muller et al. (1995) Nature 374: 727-730.
[0928] Mundy & Chua (1988) EMBO J. 7: 2279-2286.
[0929] Munro & Pelham (1987) Cell 48: 899-907.
[0930] Munster et al. (2001) Gene 262:1-130.
[0931] Murre et al. (1989) Cell 56: 777-783.
[0932] Muslin & Xing (2000) Cell Signal 12: 703-709.
[0933] Myers & Miller (1988) CABIOS 4:11.
[0934] Nagamara-lnoue et al. (2001) Int. Rev. Immunol. 20: 83-105.
[0935] Nakamura et al. (1996) Plant Mol. Biol. 30: 381-385.
[0936] Needleman & Wunsch (1970) J. Mol. Biol. 48:443.
[0937] Negrotto et al., (2000) Plant Cell Reports 19:798-803.
[0938] Nelson et al. (1997) Plant Physiol. 114: 29-37.
[0939] Nepveu (2001) Gene 270:1-15.
[0940] Ng & Yanofsky (2001) Nat. Rev. Genet. 2:186-195.
[0941] Nielsen et al. (1986) J. Biol. Chem. 261: 3661-3669.
[0942] Norris et al., (1993) Plant Mol Biol 21:895-906.
[0943] Nurnberger & Scheel (2001) Trends Plant Sci. 6: 372-379.
[0944] O'Connell et al. (2001) J. Biol. Chem. 276: 43065-43073.
[0945] Odagaki et al. (1999) Structure Fold Des. 7: 399-411.
[0946] Ohtsuka et al., (1985) J. Biol. Chem. 260:2605-2608.
[0947] Oliveira et al. (2001) Braz. J. Med. Biol. Res. 34: 567-575.
[0948] Ono et al. (1996) Plant Physiol. 112: 483-491.
[0949] Ono et al. (2001) Proc. Natl. Acad. Sci. USA 98: 759-764.
[0950] Oppenheimer et al. (1991) Cell 67: 483-493.
[0951] Orzaez & Granell (1997) FEBS Lett. 404: 275-278.
[0952] O'Shea et al. (1989) Science 243: 538-542.
[0953] Pacciotti et al. (1985) Bio/Technology 3:241.
[0954] Panavas et al. (1999) Plant Mol. Biol. 40: 237-248.
[0955] Park et al. (1985) J. Plant Biol., 38:365.
[0956] Park et al. (1998) EMBO J. 17: 859-867.
[0957] Pascual et al. (2000) J. Mol. Biol. 304: 723-729.
[0958] Paszkowski et al. (1984) EMBO J. 3:2717.
[0959] PCT International Publication No. WO 93/05163
[0960] PCT International Publication No. WO 93/07278
[0961] PCT International Publication WO 93/21335
[0962] PCT International Publication WO 94/00977
[0963] PCT International Publication No. WO 94/20627
[0964] PCT International Publication No. WO 95/16783
[0965] PCT International Publication WO 95/19431
[0966] PCT International Publication WO 96/06166
[0967] PCT International Publication WO 98/54311
[0968] PCT International Publication WO 99/32619
[0969] PCT International Publication WO 99/53050
[0970] PCT International Publication WO 99/61631
[0971] PCT International Publication No. WO 00/07210
[0972] PCT International Publication No. WO 00/760067
[0973] PCT International Publication No. WO 01/07618
[0974] Pearson & Lipman (1988) Proc. Natl. Acad. Sci. USA 85:2444.
[0975] Pearson et al. (1994) Meth. Mol. Biol. 24:307.
[0976] Peifer et al. (1990) Cell 63:1167-76.
[0977] Peifer et al. (1994) Cell 76:789-791.
[0978] Pelham (1990) Trends Biochem. Sci. 15: 483-486.
[0979] Perrin (2001) Curr. Biol. 11: R213-R216.
[0980] Persson et al. (2001) Plant Physiol. 126: 1092-1104.
[0981] Phillips et al. (1988) in Corn and Corn Improvement, 3^{rd} ed, Sprague et al. eds., Amer. Soc of Agronomy.
[0982] Picard et al., (1988) Cell 54: 1073-1080.
[0983] Pih et al. (1999) Mol. Cells 9: 84-90.
[0984] Ponting (2000) Trends Biochem. Sci. 25: 423-426.
[0985] Ponting & Parker (1996) Protein Sci. 5: 162-166.
[0986] Postma-Haarsma et al. (2002) Plant Mol Biol 48: 423-41.
[0987] Potrykus (1985) Trends Biotech. 7:269.
[0988] Potuschak & Doerner (2001) Curr. Opin. Plant Biol. 4: 501-506.
[0989] Powell et al., (1989) Proc. Natl. Acad. Sci. USA 86:6949-6952.
[0990] Presley et al. (2002) Nature 417: 187-193.
[0991] Purugganan et al. (1995) Genetics 140: 345-356.
[0992] Ratajczak (2000) Biochim Biophys Acta 1465: 17-36.
[0993] Raven et al. (1999) Biology of Plants, Freeman/Worth.
[0994] Rea et al. (1998) Annu. Rev. Plant Physiol. Plant Mol. Biol. 49: 727-760.
[0995] Reddy (2001) Int. Rev. Cytol. 204: 97-178.
[0996] Redei & Koncz, (1992) in Methods in Arabidopsis Research (Koncz C, Chua N-H & Schell J, eds.) World Scientific Press, River Edge, N.J., United States of America, pp. 16-82.
[0997] Reed et al., (2001) In Vitro Cell Dev Biol-Plant 37:127-132.
[0998] Reichelt et al. (1999) Plant J. 19: 555-567.
[0999] Reiser et al. (1995) Cell 83:735.
[1000] Reizer et al. (1991) Mol. Microbiol. 5: 1081-1089.
[1001] Riechmann et al. (1994) Nucl. Acids Res. 22: 749-755.
[1002] Riechmann & Meyerowitz (1997) Biol. Chem. 378: 1079-1101.
[1003] Riggs et al. (1986) Proc. Natl. Acad. Sci. USA 83:5602.
[1004] Ritz et al. (2001) J. Biol. Chem. 276: 22273-22277.
[1005] Robertson & Chandler (1992) Plant Mol. Biol. 19: 1031-1044.
[1006] Robins et al. (1998) J. Med. Chem. 41: 3857-3864.
[1007] Robles et al. (1997) J. Neurosci. Res. 47: 90-97.
[1008] Rogers et al., (1985) Proc. Natl. Acad. Sci. USA 82:6512-6516.
[1009] Rogers et al. (2001) J. Biol. Chem. 276: 30914-30922.
[1010] Rohrmeier & Lehle, (1993) Plant Mol Biol 22:783-792.
[1011] Roosens et al. (2000) Biochim. Biophys. Acta 1463: 470-476.
[1012] Rossolini et al., (1994) Mol Cell Probes 8:91-98.
[1013] Roth et al., (1991) Plant Cell 3:317-325.
[1014] Rothstein et al. (1987) Gene 53:153.
[1015] Ruberti et al. (1991) EMBO J. 10: 1787-1791.
[1016] Sabelli et al. (1999) Mol. Gen. Genet. 261: 820-830.
[1017] Saijo et al. (2001) Plant Cell Physiol. 42: 1228-1233.
[1018] Salvucci & Ogren (1996) Phosynthesis Res. 47: (1) 1-11.
[1019] Salvucci et al. (2001) Plant Physiol. 127: 1053-1064.
[1020] Sanchez-Fernandez et al. (2001) J. Biol. Chem. 276: 30231-30244.
[1021] Sanderfoot et al. (1999) Plant Physiol. 121: 929-938.
[1022] Sanford et al. (1987) Particulate Sci. Tech. 5:27.
[1023] Sankaranarayanan et al. (1996) Nat. Struct. Biol. 3: 596-603.
[1024] Saraste et al. (1990) Trends Biochem. Sc. 15: 430-434.
[1025] Sato et al. (1997) J. Biol. Chem. 272:24530-5.
[1026] Sauter et al. (1995) Plant J. 7: 623-632.
[1027] Savidge et al. (1995) Plant Cell 7: 721-33.
[1028] Sazer & Dasso (2000) J. Cell Sci. 113: 1111-1118.
[1029] Scharfmann et al., (1991) Proc Natl Acad Sci USA 88:4626-4630.
[1030] Schledzewski et al. (1999) J. Mol. Evol. 48: 770-778.
[1031] Schmidhauser & Helinski (1985) J. Bacteriol. 164:446.
[1032] Schneeberger et al. (1998) Development 125: 2857-2865.
[1033] Schocher et al., (1986) Bio/Technology 4:1093-1096.
[1034] Schofield (1987) Trends Neurosci. 10: 3-6.
[1035] Schultz et al. (1998) Plant Cell 10: 837-47.
[1036] Schwab et al. (2001) Phytochemistry 56: 407-415.
[1037] Schwartz et al. (1999) Proc. Natl. Acad. Sc. USA 96: 4680-4685.
[1038] Sehnke et al. (2000) Plant Physiol. 122: 235-242.
[1039] Sganga et al. (1992) Proc. Natl. Acad. Sci. USA 89: 6328-6332.
[1040] Shalev et al. (2001) J. Biol. Chem. 276: 34948-34957.
[1041] Shank et al. (2001) Plant Physiol. 126: 267-277.
[1042] Shcherban et al. (1995) Proc. Natl. Acad. Sci. USA 92: 9245-9249.
[1043] Sheridan et al. (1996) Genetics 142:1009.
[1044] Shibuya et al. (2000) J. Exp. Bot. 51: 2067-2073.
[1045] Shimamoto et al. (1989) Nature 338:274.
[1046] Shinshi et al., (1990) Plant Mol Biol 14:357-368.
[1047] Silverstone et al., (1998) Plant Cell 10:155-169.
[1048] Singh, (1986) Breeding for Resistance to Diseases and Insect Pests, Springer-Verlag, New York, N.Y., United States of America.
[1049] Singh et al. (1998) J. Plant. Physiol. 153: 316-323.
[1050] Sinha et al. (1993) Genes Dev. 7: 787-795.
[1051] Sjodahl et al. (1995) Planta 197:264.
[1052] Skuzeski et al. (1990) Plant Mol. Biol., 15: 65.
[1053] Smilie (1979) Trends Biochem. Sci. 4: 151-155.
[1054] Smith et al., (2000) Nature 407:319-320.
[1055] Smith & Waterman (1981) Adv. Appl. Math. 2: 482.
[1056] Smith et al. (1997) Ann. Rev. Plant Biol. 48: 67.
[1057] Solocombe et al. (1994) Plant Physiol. 104:1167.
[1058] Sontag (2001) Cell Signal 13: 7-16.
[1059] Spencer et al. (1990) Theor. Appl. Genet. 79:625.
[1060] Staub et al. (1992) Plant Cell 4:39.
[1061] Staub et al. (1993) EMBO J. 12:601.
[1062] Stintzi et al. (1993) Biochimie. 75: 687-706.
[1063] Sukhapinda et al. (1987) Plant Mol. Biol. 8:209.
[1064] Sulo & Martin (1993) J. Biol. Chem. 268: 17634-17639.
[1065] Sung et al. (2001) Mol. Cells 11: 352-359.
[1066] Suss et al. (1993) Proc. Natl. Acad. Sci. USA 90: 5514-5518.
[1067] Svab et al. (1990) Proc. Natl. Acad. Sci. USA 87:8526.
[1068] Takahashi et al. (1994) Plant Mol. Biol. 26: 339-352.
[1069] Takamori et al. (2000) Nature 407: 189-194.
[1070] Tanaka et al. (1997) Plant Mol. Biol. 35: 981-986.
[1071] Tapon & Hall (1997) Curr. Opin. Cell. Biol. 9: 86-92.
[1072] Taylor et al., (1993) Plant Cell Rep 12:491-495.
[1073] Theissen et al. (2000) Plant Mol. Biol. 42: 115-149.
[1074] Thompson et al. (1987) EMBO J. 6:2519.
[1075] Tomes et al. (1995) Plant Cell, Tissue and Organ Culture: Fundamental Methods, Springer-Verlag.
[1076] Triezenberg et al., (1988) Genes Dev 2:718-729.
[1077] Trimarchi & Lees (2002) Nat. Rev. Mol. Cell. Biol. 3:11-20.
[1078] Tsutsumi et al. (1994) Gene 141: 215-220.
[1079] Turner et al., (1987) Cold Spring Harb Symp Quant Biol LII:123-133.
[1080] Udaka et al. (2000) J. Nutr. Sci. Vitaminol. (Tokyo) 46: 84-90.
[1081] Uknes et al., (1992) Plant Cell 4:645-656.
[1082] Umeda et al. (1999) Mol. Gen. Genet 262: 230-238.
[1083] Unger et al., (1989) Plant Mol Biol 13:411-418.
[1084] Urao et al. (1996) Plant Mol. Biol. 32:571.
[1085] U.S. Patent Application No. 20010049831
[1086] U.S. Pat. No. 4,554,101
[1087] U.S. Pat. No. 4,940,935
[1088] U.S. Pat. No. 4,945,050
[1089] U.S. Pat. No. 4,987,071
[1090] U.S. Pat. No. 5,036,006
[1091] U.S. Pat. No. 5,100,792
[1092] U.S. Pat. No. 5,188,642
[1093] U.S. Pat. No. 5,270,163
[1094] U.S. Pat. No. 5,350,689
[1095] U.S. Pat. No. 5,451,513
[1096] U.S. Pat. No. 5,466,785
[1097] U.S. Pat. No. 5,491,288
[1098] U.S. Pat. No. 5,501,967
[1099] U.S. Pat. No. 5,523,311
[1100] U.S. Pat. No. 5,545,817
[1101] U.S. Pat. No. 5,545,818
[1102] U.S. Pat. No. 5,591,616
[1103] U.S. Pat. No. 5,614,395
[1104] U.S. Pat. No. 5,639,949
[1105] U.S. Pat. No. 5,767,378
[1106] U.S. Pat. No. 5,929,226
[1107] U.S. Pat. No. 5,990,386
[1108] U.S. Pat. No. 5,994,629
[1109] U.S. Pat. No. 6,087,175
[1110] U.S. Pat. No. 6,369,298
[1111] Van Breusegem et al. (1994) Planta 193: 57-66.
[1112] Van den Broeck et al., (1985) Nature 313:358-363.
[1113] van der Krol et al., (1991) In Antisense nucleic acids and Proteins (Joseph M & van der Krol A, eds.) Marcel Dekker Inc, New York, N.Y., United States of America, pp. 125-141.
[1114] van Hemert et al. (2001) Bioessays 23: 936-946.
[1115] van Hille et al. (1993) Biochem Biophys Res. Commun. 197:15-21.
[1116] Vasil et al. (1989) Mol. Microbiol. 3:371.
[1117] Vasil et al., (1992) Bio/Technology 10:667-674.
[1118] Vasil et al. (1993) Biotechnology 11:1553.
[1119] Vazquez-Tello et al. (1998) Mol. Gen. Genet 257: 157-166.
[1120] Villalba et al. (1993) Eur. J. Biochem. 216: 863-869.
[1121] Vollbrecht et al. (1991) Nature 350: 241-243.
[1122] Vos et al. (2000) Plant Cell 12: 979-990.
[1123] Wadzinski et al. (1993) Mol. Cell Biol. 13: 2822-2834.
[1124] Walter et al. (1990) J. Biol. Chem. 265: 14016-22.
[1125] Warner et al., (1993) Plant J 3:191-201.
[1126] Wasmann et al., (1986) Mol Gen Genet 205:446-453.
[1127] Watanabe et al. (1994) J. Biol. Chem. 269: 7744-7749.
[1128] Waterhouse et al., (1998) Proc Natl Acad Sci USA 95:13959-13964.
[1129] Weeks et al. (1993) Plant Physiol. 102: 1077.
[1130] Weissinger et al. (1988) Ann. Rev. Genet. 22: 421.
[1131] Welsh, (1981) Fundamentals of Plant Genetics and Breeding, John Wiley & Sons, New York, N.Y., United States of America.
[1132] Wen et al. (1989) Nucl. Acids Res. 17: 9490.
[1133] White et al. (1990) Nucl. Acids Res. 18:1062.
[1134] Williams et al., (1993) J Clin Invest 92:503-508.
[1135] Williams-Carrier et al. (1997) Development 124: 3737-3745.
[1136] Winge et al. (1997) Plant Mol. Biol. 35: 483-495.
[1137] Wolf & Borchardt (1991) J. Med. Chem. 34:1521-1530.
[1138] Wood, (1983) Crop Breeding, American Society of Agronomy, Madison, Wis., United States of America.
[1139] Wricke & Weber, (1986) Quantitative Genetics and Selection Plant Breeding, Walter de Gruyter and Co., Berlin, Germany.
[1140] Wu et al. (1995) Mol. Cell. Biol. 15: 2536-2546.
[1141] Xia et al. (1996) Plant J. 10: 761-769.
[1142] Xiong et al. (2001a) Genes Dev. 15:1971-1984.
[1143] Xiong et al. (2001 b) Mol. Plant Microbe Interact. 14: 685-692.
[1144] Xu et al., (1993) Plant Mol Biol 22:573-588.
[1145] Yamaguchi-Shinozaki et al. (1990) Plant Mol. Biol. 14: 29-39.
[1146] Yao et al. (2001) Proc. Natl. Acad. Sci. USA 98: 1306-1311.
[1147] Yazaki et al. (2001) J. Exp. Bot. 52: 877-9.
[1148] Yokota et al. (1999a) Plant Physiol. 119: 231-240.
[1149] Yokota et al. (1999b) Plant Physiol. 121: 525-534.
[1150] York et al. (1994) Biochemistry 33: 13164-13171.
[1151] Yucel (2000) J. Cell. Biol. 150:1-11.
[1152] Zhang et al. (1998) EMBO J. 17: 6404-6411.
[1153] Zhao & Last, (1995) J. Biol. Chem. 270: 6081-6087.
[1154] Zhao et al., (2000) Plant Mol Biol 44:789-98.
[1155] Zhao et al. (2001) EMBO J. 20: 2315-2325.
[1156] Zhong et al. (1996) Mol. Gen. Genet. 251:196.
[1157] Zhu & Xiao (1998) Nucl. Acids Res. 26: 5402-5408.
[1158] Zhu et al., (1999) Proc Natl Acad Sci USA 96:8768-8773.
[1159] Zhu et al. (2001) Plant Physiol. Biochem. 39: 221-242.
[1160] Zilliacus et al. (2001) Mol. Endocrinol. 15: 501-511.
[1161] Zollman, et al. (1994) Proc. Natl. Acad. Sci. USA 91: 10717-21.

[1162] Those skilled in the art will recognize, or be able to ascertain, using no more than routine experimentation, numerous equivalents to the specific embodiments described specifically herein. Such equivalents are intended to be encompassed in the scope of the following claims.

What is claimed is:

1. An isolated nucleic acid molecule encoding a stress-related polypeptide, wherein the polypeptide binds in a yeast two hybrid assay to a fragment of a protein selected from the group consisting of OsGF14-c (SEQ ID NO: 113), OsDAD1 (SEQ ID NO: 128), Os006819-2510 (SEQ ID NO: 20), OsCRTC (SEQ ID NO: 134), OsSGT1 (SEQ ID NO: 144), OsERP (SEQ ID NO: 146), OsCHIB1 (SEQ ID NO: 152), OsCS (SEQ ID NO: 156), OsPP2A-2 (SEQ ID NO: 164), and OsCAA90866 (SEQ ID NO: 170).

2. The isolated nucleic acid molecule of claim 1, wherein the isolated nucleic acid molecule is derived from rice (Oryza sativa).

3. The isolated nucleic acid molecule of claim 1, wherein the isolated nucleic acid molecule comprises a nucleic acid sequence selected from the group consisting of odd numbered SEQ ID NOs: 1-111.

4. The isolated nucleic acid molecule of claim 3, wherein the isolated nucleic acid molecule comprises a nucleic acid sequence of one of odd numbered SEQ ID NOs: 1-15 and the protein comprises an amino acid sequence of SEQ ID NO: 114.

5. The isolated nucleic acid molecule of claim 3, wherein the isolated nucleic acid molecule comprises a nucleic acid sequence of one of SEQ ID NOs: 7 and 17 and the protein comprises an amino acid sequence of SEQ ID NO: 128.

6. The isolated nucleic acid molecule of claim 3, wherein the isolated nucleic acid molecule comprises a nucleic acid sequence of one of odd numbered SEQ ID NOs: 21-25 and the protein comprises an amino acid sequence of SEQ ID NO: 20.

7. The isolated nucleic acid molecule of claim 3, wherein the isolated nucleic acid molecule comprises a nucleic acid sequence of SEQ ID NO: 27 and the protein comprises an amino acid sequence of SEQ ID NO: 134.

8. The isolated nucleic acid molecule of claim 3, wherein the isolated nucleic acid molecule comprises a nucleic acid sequence of SEQ ID NO: 29 and the protein comprises an amino acid sequence of SEQ ID NO: 138.

9. The isolated nucleic acid molecule of claim 3, wherein the isolated nucleic acid molecule comprises a nucleic acid sequence of one of odd numbered SEQ ID NOs: 31-43 and the protein comprises an amino acid sequence of SEQ ID NO: 144.

10. The isolated nucleic acid molecule of claim 3, wherein the isolated nucleic acid molecule comprises a nucleic acid sequence of one of odd numbered SEQ ID NOs: 45-67 and the protein comprises an amino acid sequence of SEQ ID NO: 146.

11. The isolated nucleic acid molecule of claim 3, wherein the isolated nucleic acid molecule comprises a nucleic acid sequence of SEQ ID NO: 69 and the protein comprises an amino acid sequence of SEQ ID NO: 36.

12. The isolated nucleic acid molecule of claim 3, wherein the isolated nucleic acid molecule comprises a nucleic acid sequence of one of odd numbered SEQ ID NOs: 71-77 and the protein comprises an amino acid sequence of SEQ ID NO: 152.

13. The isolated nucleic acid molecule of claim 3, wherein the isolated nucleic acid molecule comprises a nucleic acid sequence of one of odd numbered SEQ ID NOs: 79-95 and the protein comprises an amino acid sequence of SEQ ID NO: 156.

14. The isolated nucleic acid molecule of claim 3, wherein the isolated nucleic acid molecule comprises a nucleic acid sequence of one of odd numbered SEQ ID NOs: 97-105 and the protein comprises an amino acid sequence of SEQ ID NO: 164.

15. The isolated nucleic acid molecule of claim 3, wherein the isolated nucleic acid molecule comprises a nucleic acid sequence of one of odd numbered SEQ ID NOs: 97 and 107-111 and the protein comprises an amino acid sequence of SEQ ID NO: 170.

16. An isolated nucleic acid molecule encoding a stress-related polypeptide, wherein the nucleic acid molecule is selected from the group consisting of:
(a) a nucleic acid molecule encoding a polypeptide comprising an amino acid sequence of one of even numbered SEQ ID NOs: 2-112;
(b) a nucleic acid molecule comprising a nucleic acid sequence of one of odd numbered SEQ ID NOs: 1-111;
(c) a nucleic acid molecule that has a nucleic acid sequence at least 90% identical to the nucleic acid sequence of the nucleic acid molecule of (a) or (b);
(d) a nucleic acid molecule that hybridizes to (a) or (b) under conditions of hybridization selected from the group consisting of:
(i) 7% sodium dodecyl sulfate (SDS), 0.5 M NaPO₄, 1 mM ethylenediamine tetraacetic acid (EDTA) at 50° C. with a final wash in 2× standard saline citrate (SSC), 0.1% SDS at 50° C.;
(ii) 7% SDS, 0.5 M NaPO₄, 1 mM EDTA at 50° C. with a final wash in 1×SSC, 0.1% SDS at 50° C.;
(iii) 7% SDS, 0.5 M NaPO₄, 1 mM EDTA at 50° C. with a final wash in 0.5×SSC, 0.1% SDS at 50° C.;
(iv) 7% sodium dodecyl sulfate (SDS), 0.5 M NaPO₄, 1 mM EDTA at 50° C. with a final wash in 0.1×SSC, 0.1% SDS at 50° C.; and
(v) 7% sodium dodecyl sulfate (SDS), 0.5 M NaPO₄, 1 mM EDTA at 50° C. with a final wash in 0.1×SSC, 0.1% SDS at 65° C.;
(e) a nucleic acid molecule comprising a nucleic acid sequence fully complementary to (a); and
(f) a nucleic acid molecule comprising a nucleic acid sequence that is the full reverse complement of (a).

17. An isolated stress-related polypeptide encoded by the isolated nucleic acid molecule of claim 16, or a functional fragment, domain, or feature thereof.

18. A method for producing a polypeptide of claim 17, comprising the steps of:
(a) growing cells comprising an expression cassette under suitable growth conditions, the expression cassette comprising a nucleic acid molecule of claim 16; and
(b) isolating the polypeptide from the cells.

19. A transgenic plant cell comprising an isolated nucleic acid molecule of claim 1.

20. The transgenic plant of claim 19, wherein the plant is selected from the group consisting of corn (Zea mays), Brassica sp., alfalfa (Medicago sativa), rice (Oryza sativa ssp.), rye (Secale cereale), sorghum (Sorghum bicolor, Sorghum vulgare), pearl millet (Pennisetum glaucum), proso millet (Panicum miliaceum), foxtail millet (Setaria italica), finger millet (Eleusine coracana), sunflower (Helianthus annuus), safflower (Carthamus tinctorius), wheat (Triticum aestivum), soybean (Glycine max), tobacco (Nicotiana tabacum), potato (Solanum tuberosum), peanut (Arachis hypogaea), cotton, sweet potato (Ipomoea batatus), cassaya (Manihot esculenta), coffee (Cofea spp.), coconut (Cocos nucifera), pineapple (Ananas comosus), citrus trees (Citrus spp.), cocoa (Theobroma cacao), tea (Camellia sinensis), banana (Musa spp.), avocado (Persea ultilane), fig (Ficus casica), guava (Psidium guajava), mango (Mangifera indica), olive (Olea europaea), papaya (Carica papaya), cashew (Anacardium occidentale), macadamia (Macadamia integrifolia), almond (Prunus amygdalus), sugar beets (Beta vulgaris), sugarcane (Saccharum spp.), oats, duckweed (Lemna), barley, a vegetable, an ornamental, and a conifer.

21. The transgenic plant of claim 20, wherein the plant is rice (Oryza sativa ssp.)

22. The transgenic plant of claim 20, wherein the duckweed is selected from the group consisting of genus Lemna, genus Spirodela, genus Woffia, and genus Wofiella.

23. The transgenic plant of claim 20, wherein the vegetable is selected from the group consisting of tomatoes, lettuce, guar, locust bean, fenugreek, soybean, garden beans, cowpea, mungbean, lima bean, fava bean, lentils, chickpea, green bean, lima bean, pea, and members of the genus Cucumis.

24. The transgenic plant of claim 20, wherein the ornamental is selected from the group consisting of impatiens, Begonia, Pelargonium, Viola, Cyclamen, Verbena, Vinca, Tagetes, Primula, Saint Paulia, Agertum, Amaranthus, Antihirrhinum, Aquifegia, Cineraria, Clover, Cosmo, Cowpea, Dahlia, Datura, Delphinium, Gerbera, Gladiolus, Gloxinia, Hippeastrum, Mesembryanthemum, Salpiglossos, and Zinnia, azalea, hydrangea, hibiscus, rose, tulip, daffodil, petunia, carnation, poinsettia, and chrysanthemum.

25. The transgenic plant of claim 20, wherein the conifer is selected from the group consisting of loblolly pine, slash pine, ponderosa pine, lodgepole pine, Monterey pine, Douglas-fir, Western hemlock, Sitka spruce, redwood, silver fir, balsam fir, Western red cedar, and Alaska yellow-cedar.

26. The transgenic plant of claim 19, wherein the transgenic plant is a plant selected from the group consisting of Acacia, aneth, artichoke, arugula, blackberry, canola, cilantro, clementines, escarole, eucalyptus, fennel, grapefruit, honey dew, jicama, kiwifruit, lemon, lime, mushroom, nut, okra, orange, parsley, persimmon, plantain, pomegranate, poplar, radiata pine, radicchio, Southern pine, sweetgum, tangerine, triticale, vine, yams, apple, pear, quince, cherry, apricot, melon, hemp, buckwheat, grape, raspberry, chenopodium, blueberry, nectarine, peach, plum, strawberry, watermelon, eggplant, pepper, cauliflower, Brassica, broccoli, cabbage, ultilan sprouts, onion, carrot, leek, beet, broad bean, celery, radish, pumpkin, endive, gourd, garlic, snapbean, spinach, squash, turnip, ultilane, and zucchini.

27. An isolated stress-related polypeptide, wherein the polypeptide binds in a yeast two hybrid assay to a fragment of a protein selected from the group consisting of OsGF14-c (SEQ ID NO: 113), OsDAD1 (SEQ ID NO: 128), Os006819-2510 (SEQ ID NO: 20), OsCRTC (SEQ ID NO: 134), OsSGT1 (SEQ ID NO: 144), OsERP (SEQ ID NO: 146), OsCHIB1 (SEQ ID NO: 152), OsCS (SEQ ID NO: 156), OsPP2A-2 (SEQ ID NO: 164), and OsCAA90866 (SEQ ID NO: 170).

28. The isolated stress-related polypeptide of claim 17, wherein the isolated stress-related polypeptide is selected from the group consisting of:
(a) a polypeptide comprising an amino acid sequence of even numbered SEQ ID NOs: 2-112; and
(b) a polypeptide comprising an amino acid sequence at least 80% similar to the polypeptide of (a) using the GCG Wisconsin Package SEQWEB® application of GAP with the default GAP analysis parameters.

29. The isolated stress-related polypeptide of claim 28, wherein the polypeptide comprises an amino acid sequence of one of even numbered SEQ ID NOs: 2-112.

30. An expression cassette comprising a nucleic acid molecule encoding a stress-related polypeptide of claim 1.

31. The expression cassette of claim 30, wherein the nucleic acid molecule encoding a stress-related polypeptide comprises a nucleic acid sequence selected from odd numbered SEQ ID NOs: 1-111.

32. The expression cassette of claim 30, wherein the expression cassette further comprises a regulatory element operatively linked to the nucleic acid molecule.

33. The expression cassette of claim 32, wherein the regulatory element comprises a promoter.

34. The expression cassette of claim 33, wherein the promoter is a plant promoter.

35. The expression cassette of claim 33, wherein the promoter is a constitutive promoter.

36. The expression cassette of claim 33, wherein the promoter is a tissue-specific or a cell type-specific promoter.

37. The expression cassette of claim 36, wherein the tissue-specific or cell type-specific promoter directs expression of the expression cassette in a location selected from the group consisting of epidermis, root, vascular tissue, meristem, cambium, cortex, pith, leaf, flower, seed, and combinations thereof.

38. A transgenic plant cell comprising the expression cassette of claim 30.

39. The transgenic plant cell of claim 38, wherein the isolated nucleic acid molecule comprises a nucleic acid sequence of one of odd numbered SEQ ID NOs: 1-111.

40. A transgenic plant comprising the expression cassette of claim 30.

41. Transgenic seeds or progeny of the trangenic plant of claim 40.

42. A method for modulating stress response of a plant cell comprising introducing into the plant cell an expression cassette comprising an isolated nucleic acid molecule encoding a stress-related polypeptide, wherein the polypeptide binds in a yeast two hybrid assay to a fragment of a protein selected from the group consisting of OsGF14-c (SEQ ID NO: 113), OsDAD1 (SEQ ID NO: 128), Os006819-2510 (SEQ ID NO: 20), OsCRTC (SEQ ID NO: 134), OsSGT1 (SEQ ID NO: 144), OsERP (SEQ ID NO: 146), OsCHIB1 (SEQ ID NO: 152), OsCS (SEQ ID NO: 156), OsPP2A-2 (SEQ ID NO: 164), and OsCAA90866 (SEQ ID NO: 170).

43. The method of claim 42, wherein expression of the polypeptide in the cell results in an enhancement of a rate or extent of proliferation of the cell.

44. The method of claim 42, wherein expression of the polypeptide in the cell results in a decrease in a rate or extent of proliferation of the cell.

45. The method of claim 42, wherein the isolated nucleic acid molecule comprises a nucleic acid sequence selected from one of odd numbered SEQ ID NOs: 1-173.

46. The method of claim 45, wherein the isolated nucleic acid molecule comprises a nucleic acid sequence selected from one of odd numbered SEQ ID NOs: 1-111.

The application's sequence listing, which the Patent Office published only in electronic form, follows.

SEQUENCE LISTING (174 sequences)

SEQ ID NO: 1 - DNA, 1383 bp, Oryza sativa
  CDS (1)..(1383)
gcttcctttcggactgttggtgctaaaatcactcaggaaactggtgatttctttgttagcgatgcagagggtgacccagacaaaccaactgatggtttttcctctattgatgaggctataggcgcattgcatgaaggaaagtttgttattgctgtagatgatgaaagcggtgataatgaaggggatcttgtcatggcagctacgctggcagacccagaatctattgcattcatgatcaggaatggttctgggatcatctcagtgggcatgaaggaagaggacttaacaagattgatgattcctatgatgtctccaattgcagaaattgaggatatttcagctgctgcttccacagtaacagtggatgccagagtgggcatatcaaccggcgtctcggctgcagatagggcaaaaacgatttttactctagcctcccctgattctaagccaactgacctcagaagaccaggccatatattccctctaaaataccgaaacggtggtgtgctaaaaagagctggacatactgaggcatccgtcgatcttgtcgcgttggctggcttgcgccctgtgtctgtcctgtcaaccgtcatcaacccagtggatggttcaatggcaggaatgccagtgctgaaacagatggctttggagcatgatatcccaattgtttcaatcgctgatctcatccggtatagaaggaagagggagaagctggtggaactgattgctgtatctcgtttgccgacgaaatggggccttttccgagcttactgctaccaatccaagcttgatggaaccgagcacattgctgttgcaaagggcgacatcggcgacggcgaggacgtcttggtgagggtccattccgagtgcctgaccggcgacatcctcggctccgcccgctgcgactgcggcaaccagctggacctggcgatgcagctcatcgacaaggccggccgcggcgtcctcgtctacctccgcggccacgagggccgcggcatcggcctcggccagaagctccgcgcctacaacctccaggacgacggccacgacaccgtccaggccaacgtcgagctcggcctcgccgtcgactcccgcgagtacggcatcggcgcccagattctgcgggacatgggggtgcgcacgatgcggctgatgacgaacaacccggcaaagttcgtcgggctcaagggctacgggctcgccgtcgtcggcagggttccggtgatctcccccatcaccaaggagaaccagaggtacctcgagacgaagcgcaccaagatgggccatgtctacggctccgacctccccggcaacgtcccggaggaattcctcaacccggacgacatcgccggagaccaagacgaagacgacacccacaactga

SEQ ID NO: 2 - protein, 460 aa, Oryza sativa
ASFRTVGAKITQETGDFFVSDAEGDPDKPTDGFSSIDEAIGALHEGKFVIAVDDESGDNEGDLVMAATLADPESIAFMIRNGSGIISVGMKEEDLTRLMIPMMSPIAEIEDISAAASTVTVDARVGISTGVSAADRAKTIFTLASPDSKPTDLRRPGHIFPLKYRNGGVLKRAGHTEASVDLVALAGLRPVSVLSTVINPVDGSMAGMPVLKQMALEHDIPIVSIADLIRYRRKREKLVELIAVSRLPTKWGLFRAYCYQSKLDGTEHIAVAKGDIGDGEDVLVRVHSECLTGDILGSARCDCGNQLDLAMQLIDKAGRGVLVYLRGHEGRGIGLGQKLRAYNLQDDGHDTVQANVELGLAVDSREYGIGAQILRDMGVRTMRLMTNNPAKFVGLKGYGLAVVGRVPVISPITKENQRYLETKRTKMGHVYGSDLPGNVPEEFLNPDDIAGDQDEDDTHN

SEQ ID NO: 3 - DNA, 267 bp, Oryza sativa
  CDS (1)..(267)
ggaacaaaccctggcttcagagttggagagatcaggctctccaacagggatatttatttcggcacattattggggaacacaccagagggttcagggaggtatgtctggtcagatggttgcacttacgatggtgagtggaggagagggatgaggcatgggcaaggaaagacaatgtggccatctggagccacctacgagggtgagtactctggtggctacatttatggtgaaggcacatataccgggtctgacaacatcgtctacaag

SEQ ID NO: 4 - protein, 89 aa, Oryza sativa
GTNPGFRVGEIRLSNRDIYFGTLLGNTPEGSGRYVWSDGCTYDGEWRRGMRHGQGKTMWPSGATYEGEYSGGYIYGEGTYTGSDNIVYK

SEQ ID NO: 5 - DNA, 1227 bp, Oryza sativa
  CDS (1)..(1227)
ccacgcgtccggagaagcggccgctttttttttttgttttcccctccgactccgactccgatcgatctccaccccgaatccctcctcctcaccgccggcgagcttccggctgcggcggagatggccacacgttattggatcgtgtctcttcccgtgcagactcctggctccaccgccaattctctctgggcgcgcctccaggactccatctcgcgccactccttcgacacgccgctctaccggtttaacgtccccgatctccgcgtcggcacgctcgactccctcctcgccctcagcgacgatctcgtcaagtccaacgtcttcatcgagggggtctcgcacaagatccggaggcagatcgaggagctagagcgcgccgggggtgtcgagagtggggctctcaccgttgacggcgtccccgtcgacacctacctcaccaggtttgtgtgggatgagggcaaatacccaacgatgtcaccgctcaaggagattgccggcagcatccaatcacaggtctccaagattgaagatgacatgaaggttcgaggagcggaatacaataatgtaaggagccagcttaatgcgatcaacagaaagcaaaccggaagcttagcagttcgtgatctttccaatctggtaaaaccagaggatatggtcacatcagaacatctagtgacactccttgcagttgttcctcagtactctcaaaaggattggttgtcaagctatgagtcccttgacacatttgtggtaccgagatcgtctaaaaaactttatgaggacaatgagtatgctctctacacggtaacattgtttgctaaggttgttgacaactttaaggtccgtgcacgtgaaaaaggtttccaggttcgcgattttgagtatagttctgaagcacaggaaagtaggaaggaagagctggaaaagctaatgcaagaccaggaagcaatgagggcatcacttctgcaatggtgctatgccagctacagtgaggtattcagttcctggatgcacttctgtctggtgcgtgtctttgtagagagcattcttagatatggtcttcccccatcattcctgtctgctgttctagcaccttctcaaaagggtgaaaagaaagtaaggagcatcctgaggaactctgtgggcaatgtccatagtatttattggaaatctgaagacgatgttggtgtagctggtctgggaggcaaggcagtgtttttggagtaa

SEQ ID NO: 6 - protein, 408 aa, Oryza sativa
PRVRRSGRFFFLFSPPTPTPIDLHPESLLLTAGELPAAAEMATRYWIVSLPVQTPGSTANSLWARLQDSISRHSFDTPLYRFNVPDLRVGTLDSLLALSDDLVKSNVFIEGVSHKIRRQIEELERAGGVESGALTVDGVPVDTYLTRFVWDEGKYPTMSPLKEIAGSIQSQVSKIEDDMKVRGAEYNNVRSQLNAINRKQTGSLAVRDLSNLVKPEDMVTSEHLVTLLAVVPQYSQKDWLSSYESLDTFVVPRSSKKLYEDNEYALYTVTLFAKVVDNFKVRAREKGFQVRDFEYSSEAQESRKEELEKLMQDQEAMRASLLQWCYASYSEVFSSWMHFCLVRVFVESILRYGLPPSFLSAVLAPSQKGEKKVRSILRNSVGNVHSIYWKSEDDVGVAGLGGKAVFLE

SEQ ID NO: 7 - DNA, 1512 bp, Oryza sativa
  CDS (1)..(1512)
aagtatgctgagcgtgggcttcgttctcttgctgttgcaagacaggaagtacctgagaagtcgaaggagtctgctggtggaccatggcaattcgttggtctgctgcccctgtttgatcccccgaggcacgacagtgctgaaactatccggaaggctctccatcttggtgttaatgttaagatgatcactggtgaccagcttgctattggtaaggagactggtaggaggcttggaatgggtacaaacatgtatccttcatccgcattgctcggacaaaacaaggacgcttcacttgaggcacttcccgtggatgagctcattgagaaggctgatggttttgccggagtcttccctgagcacaaatatgagatcgtgaagaggttgcaagagaagaagcacatcgtcggtatgaccggagatggtgtcaatgatgcccctgctcttaagaaggccgacattggtattgctgttgctgatgcaatagatgctgcaagaagtgcttccgacattgtgctcactgagccaggtcttagtgtcattatcagcgctgtcctcactagcagatgcatcttccagaggatgaagaactataccatttatgcagtttccatcaccatccgtatagtgcttggatttttgcttattgctctgatctggaaatacgacttctcacccttcatggtccttatcattgccatcctgaatgacggtactatcatgacgatctcgaaggacagagttaagccttctcccttgccagacagctggaagctgaaggaaatcttcgctaccggtattgtgcttggaagctaccttgctctgatgaccgttattttcttctgggccatgcacaagacagactttttcacggacaaattcggtgtcagatcaatcaggaacagtgaacatgagatgatgtctgcactgtacctccaagtcagtattgtgagtcaggccctcatcttcgtcacccgttctcgcagctggtccttcatcgaacgccctggtcttctcttggtcactgcattcatgcttgcacaactggttgcgacattcctcgctgtctatgccaactggggctttgccaggatcaagggcattggctggggctgggctggcgttatctggctttacagcattgtgttctacttccctcttgacatcttcaagttcttcatccgctttgtgctgagtggaagggcctgggacaacctccttgagaacaagattgcattcaccaccaagaaggattacggtagggaggagagggaggcacaatgggccaccgcacaaagaacacttcacggccttcagccaccggaggtcgcctccaacacgctcttcaacgacaagagcagctaccgcgagctctctgagatcgctgagcaagccaagagacgagctgagatcgcgaggctgagagagctgaacactctcaagggccacgtcgaatcggtggtgaagctgaaggggctggacatcgacacgatccagcagaactacacagtgtga

SEQ ID NO: 8 - protein, 503 aa, Oryza sativa
KYAERGLRSLAVARQEVPEKSKESAGGPWQFVGLLPLFDPPRHDSAETIRKALHLGVNVKMITGDQLAIGKETGRRLGMGTNMYPSSALLGQNKDASLEALPVDELIEKADGFAGVFPEHKYEIVKRLQEKKHIVGMTGDGVNDAPALKKADIGIAVADAIDAARSASDIVLTEPGLSVIISAVLTSRCIFQRMKNYTIYAVSITIRIVLGFLLIALIWKYDFSPFMVLIIAILNDGTIMTISKDRVKPSPLPDSWKLKEIFATGIVLGSYLALMTVIFFWAMHKTDFFTDKFGVRSIRNSEHEMMSALYLQVSIVSQALIFVTRSRSWSFIERPGLLLVTAFMLAQLVATFLAVYANWGFARIKGIGWGWAGVIWLYSIVFYFPLDIFKFFIRFVLSGRAWDNLLENKIAFTTKKDYGREEREAQWATAQRTLHGLQPPEVASNTLFNDKSSYRELSEIAEQAKRRAEIARLRELNTLKGHVESVVKLKGLDIDTIQQNYTV

SEQ ID NO: 9 - DNA, 612 bp, Oryza sativa
  CDS (1)..(612)
atggccatggccacgcaagcctccgccgccaagtgccacctcctcgccgcctgggcaccggcgaagccgcgctcatccaccctctccatgcccacctcgagggcacccacctccctcagagcggcggcggaggatcagcccgccgcggcggcgacggaggagaagaagccagcccccgcggggttcgtgccgccgcagctggaccccaacacgccgtccccgatcttcggcgggagcacggggggactcctccggaaggcgcaggtggaggagttctacgtcatcacatggacgtcgcccaaggagcaggtgttcgagatgcccacgggcggcgccgccatcatgcgcgagggccccaacctgctgaagctggccaggaaggagcagtgcctggccctgggcaccaggctccgctccaagtacaagatcaactaccagttctaccgcgtcttccccaatggcgaggtgcagtacctccaccccaaggacggcgtctacccggagaaggtcaacgccggcaggcagggcgtcggccagaacttccgcagcatcggcaagaacgtcagccccatcgaggtcaagttcaccggcaagaacgtcttcgacatctag

SEQ ID NO: 10 - protein, 203 aa, Oryza sativa
MAMATQASAAKCHLLAAWAPAKPRSSTLSMPTSRAPTSLRAAAEDQPAAAATEEKKPAPAGFVPPQLDPNTPSPIFGGSTGGLLRKAQVEEFYVITWTSPKEQVFEMPTGGAAIMREGPNLLKLARKEQCLALGTRLRSKYKINYQFYRVFPNGEVQYLHPKDGVYPEKVNAGRQGVGQNFRSIGKNVSPIEVKFTGKNVFDI

SEQ ID NO: 11 - DNA, 901 bp, Oryza sativa
  CDS (1)..(900)
gcgccaggggcgcgagtgttcctggcacggccgctcctccgccgctcgccgcggggcgtcgcctgcgcccttcgccggaggccctccaagtacaagaataaaatccagaatgaggaggttgtagtagaggatgatattggcggtggtggtgaagacgatgacgacgcgctggaagcactttttaagcagttggaagaagatctcaagaatgatgatttgtctgttgaggatgatgacgatggaatttcagaagaagatatggcaagatttgagcaggagttggcagaggcaatcggggatattgctgatgctgatgaatctggagagggttcgtcattaggctctgaggcttatgggaatgatgaaaaaacggatgaaatcaaacggccagagctgaaaaactggcaacttaagaggctggctcgtgctctcaaaataggtcgccgtaaaactagtataaagaatcttgcaggggaactaggcctggataggactttggtcattgaattgctccgaaatccacctccaaaacttctattcatgtctgattctttgcctgatgaagacccttctaaacctgaaatcaaggaaatagagccctctccagtagttgataacgctgatgtcactgaaaccaagccacagacggaacttcctgttcatgtcatgtgcgcagaatggtcttcacagaaaagattaaaaaaggtgcaactggagacattagaaagagtctactcccgaaccaaacgccctacaaatacaatgatcagcagcatagttcaagtgacaagccttccacggaagaccattgttaagtggtttgaggatagaagggaacaggatggggtacctgaccatcgagttgcattcaagagatccctatctgagaccatagctagtt

SEQ ID NO: 12 - protein, 300 aa, Oryza sativa
APGARVFLARPLLRRSPRGVACALRRRPSKYKNKIQNEEVVVEDDIGGGGEDDDDALEALFKQLEEDLKNDDLSVEDDDDGISEEDMARFEQELAEAIGDIADADESGEGSSLGSEAYGNDEKTDEIKRPELKNWQLKRLARALKIGRRKTSIKNLAGELGLDRTLVIELLRNPPPKLLFMSDSLPDEDPSKPEIKEIEPSPVVDNADVTETKPQTELPVHVMCAEWSSQKRLKKVQLETLERVYSRTKRPTNTMISSIVQVTSLPRKTIVKWFEDRREQDGVPDHRVAFKRSLSETIAS

SEQ ID NO: 13 - DNA, 799 bp, Oryza sativa
  CDS (1)..(798)
gccccacgccgcccctccaccttcctcaacgccgtcgcgctcggcaacgtcggggcgggcaagtcggccgtgctgaacagcctcatcggccaccccgtgctgccgacgggggagaacggggcgacgagggcgccaattgtggtggacctgcagagggacccgggcctcagcagcaagtccatcgtgctgcaaatcgacagcaagtcgcagcgggtgtccgcaagttcgctgcggcattcgctgcaggacaggctcagcaagggggcgtccagcggatccagtaggggccgtgtagaggggatcaatctcaagctgcggacgagtacagctcccccactaaagctggttgatttacctgggatagaccagcgagctgttgacgatccaatgattaatgaatatgctgggcacaatgatgcaatactgctagttgtgatacctgcaatgcaagcagctgatgttgcgtcatctcgagctcttaggctggccaaggatattgatgcagatggcaccagaactgtaggtgtgataagtaaagttgatcaagcagaaggagatgcaaaaactatagcttgtgttcaggcccttctgttgaataagggcccaaaaaaccttccagatatcgagtgggttgctctgataggacaatcagttgcaattgcgtcagctcaagcagcaggttctgaaaactcactagaaacagcatggaatgctgaagctgaaaccctcagatccatcttaactggagctccaaaaagtaaactaggtagaatagctctggttgacaccattgctaagc

SEQ ID NO: 14 - protein, 266 aa, Oryza sativa
APRRPSTFLNAVALGNVGAGKSAVLNSLIGHPVLPTGENGATRAPIVVDLQRDPGLSSKSIVLQIDSKSQRVSASSLRHSLQDRLSKGASSGSSRGRVEGINLKLRTSTAPPLKLVDLPGIDQRAVDDPMINEYAGHNDAILLVVIPAMQAADVASSRALRLAKDIDADGTRTVGVISKVDQAEGDAKTIACVQALLLNKGPKNLPDIEWVALIGQSVAIASAQAAGSENSLETAWNAEAETLRSILTGAPKSKLGRIALVDTIAK

SEQ ID NO: 15 - DNA, 1429 bp, Oryza sativa
  CDS (1)..(1428)
atgggggcccttttgagctcccccaacagcaagaaccagccatgggagcatggtgaagcttcaaaggcagattcctccaagaagctgcggatgtcggcgccgcctctgtccggtggctacgaccaccccgggctgatcccggggctcccggatgagatctcgctgcagatcctcgcaaggatgccccggatgggttatctgaatgcaaagatggtttcgaggagctggaaggctgcgatcactggcgtggagctgtaccgggtgaggaaggagctgggtgtgagtgaggaatggctgtacatgcttaccaagtcagatgatgggaagctagtgtggaatgcattcgatccggtttgtggccaatggcagaggctgccactgatgccggggatcagccatggaggagaatgcaagaggggcatccctgggttgtggttaggggatttgttgagcgccggcatcagggtctctgatgttattagaggctggcttggccaaagggattcattggataggcttccgttctgcggttgtgcaattgggacagtcaacgggtgcatctatgttttaggtggattctctagaggctcggcgatgaaatgtgtatggaggtatgatccttttgtcaatgcgtggcaggaggttagctcgatgagcaccgggcgcgcattctgcaaggctagcctgctgaacaacaagctgtatgttgttggtggtgtcagcaaaggcaagaacgggttagctccgctccaatccgccgaggtgtttgacccaaggacaggaatttgggtgggaggggccctgacactctccgtctcgaaagggccaagctctaccagctgcctcttggttgagctggtgaagcccattgcgacaggaatgacctctttgggaggcaagctttatgttcttcaaagtctgtattccgggccattctttgttgatgttggtggggagatctttgatccggagacaaattcatgggcggaaatgcctgtaggaatgggcgagggctggccagcgaggcaggctggtacgaagttaagtgctgtcatagatggggacttgtatgctttggagccatcaacttcttttgatagaggtaagatcaagatttatgatcctcaggaggatgcttggaaggttgccattggccaggtaccagtgggtgactttgcagagtcggaatgtccatacttacttgcaggatttcttggcaagctcaatttgatcatcaaagatgtagatagcaagatcaatataatgcaaaccgatgttctgaagcctgtggagttgtcagcccctggaaatggtccaacatgccaaaatcaacaacttttttcagaacaggaaactaatttgtggaaagtcatcgtgtcgaaaaatcttgcagccgctgaattagtcagttgtcaggtgctcaacatat

SEQ ID NO: 16 - protein, 476 aa, Oryza sativa
MGALLSSPNSKNQPWEHGEASKADSSKKLRMSAPPLSGGYDHPGLIPGLPDEISLQILARMPRMGYLNAKMVSRSWKAAITGVELYRVRKELGVSEEWLYMLTKSDDGKLVWNAFDPVCGQWQRLPLMPGISHGGECKRGIPGLWLGDLLSAGIRVSDVIRGWLGQRDSLDRLPFCGCAIGTVNGCIYVLGGFSRGSAMKCVWRYDPFVNAWQEVSSMSTGRAFCKASLLNNKLYVVGGVSKGKNGLAPLQSAEVFDPRTGIWVGGALTLSVSKGPSSTSCLLVELVKPIATGMTSLGGKLYVLQSLYSGPFFVDVGGEIFDPETNSWAEMPVGMGEGWPARQAGTKLSAVIDGDLYALEPSTSFDRGKIKIYDPQEDAWKVAIGQVPVGDFAESECPYLLAGFLGKLNLIIKDVDSKINIMQTDVLKPVELSAPGNGPTCQNQQLFSEQETNLWKVIVSKNLAAAELVSCQVLNI

SEQ ID NO: 17 - DNA, 1140 bp, Oryza sativa
  CDS (1)..(1140)
tcatccttcctttggggttatctggtgtcaccaataattggtggagcactggtcgactactatggcggaaagcgagttatggcttatggcgtggctctatggtccttggctacattcctctccccttgggcagctgctcgctctctctggttgttcctctcaactagagttctgctgggtatggcagaaggggtggcactcccaagtatgaacaacatggtgttgaggtggtttcctcgcacagagcgatcaagtgctgtcgggattgcaatggctggttttcagcttggcaataccattggtttacttctttcccctatcatcatgtcacgagctggaatttttggaccatttgtgatatttggattatttggatttctatgggtgttggtgtggatatctgctatatcagggactccaggtgaaaatgcacaaatatcagcacatgaactagattatataaccaggggtcagaaattggtaaaaactcaatctggaggtgaaagattacgaaaggtccctcctttcagcaagctactctctaaatggccaacatgggctttaatttctgcaaatgctatgcatagttggggttattttgtcattctttcatggatgccagtgtatttcaaaacaatatatcatgttaatctgagagaagctgcatggtttagtgcactcccctgggtcatgatggcagttttaggctatgttgctggtgttgtatcagacaggcttatccaaaatggtacaagcatcactttgactcggaagataatgcagacaattggctttgtgggtcctggtgtggctcttcttggactaaatgcagcaaagagtccagtcatcgcttctgcttggcttactatcgctgtaggtttgaagtcctttggtcactcaggttttctagtaaatcttcaggagattgctccacaatatgctggagtgctacatggaatgtcaaatacagctggaacatttgctgccattttaggaactgttggagcaggtttctttgtcgatcggatgggttctttccgtggatttttaatattaacatctcttctatacttcagtagcacactgttctgggatatatttgctactggagagcgtgttgattttgatggcactggctag

SEQ ID NO: 18 - protein, 379 aa, Oryza sativa
SSFLWGYLVSPIIGGALVDYYGGKRVMAYGVALWSLATFLSPWAAARSLWLFLSTRVLLGMAEGVALPSMNNMVLRWFPRTERSSAVGIAMAGFQLGNTIGLLLSPIIMSRAGIFGPFVIFGLFGFLWVLVWISAISGTPGENAQISAHELDYITRGQKLVKTQSGGERLRKVPPFSKLLSKWPTWALISANAMHSWGYFVILSWMPVYFKTIYHVNLREAAWFSALPWVMMAVLGYVAGVVSDRLIQNGTSITLTRKIMQTIGFVGPGVALLGLNAAKSPVIASAWLTIAVGLKSFGHSGFLVNLQEIAPQYAGVLHGMSNTAGTFAAILGTVGAGFFVDRMGSFRGFLILTSLLYFSSTLFWDIFATGERVDFDGTG

SEQ ID NO: 19 - DNA, 831 bp, Oryza sativa
  CDS (1)..(831)
atggcgttccggctgagcaacagcctgctcgggatcctgaacgcggtgacgttcctcctgtcggtgcccgtgctgggcggcggcatctggctggcgacgcgcgccgacggcacggagtgcgagcgctacttctcggcgccggtgatcgcgttcggggtgttcctcctcctcgtctccctcgcgggcctcgtcggcgcctgctgccgcgtcaactgcctcctctggttctacctcgtcgccatgttcgtcctcatcgtcgtcctcttctgcttcaccgtcttcgccttcgtcgtcaccaacaagggcgccggcgaggccgtctccggcagagggtacaaggagtacaggctcggcgactactccaactggctgcagaagcggatggagaacagcaagaactggaacaggatcaggagctgcctccaggactccaaggtctgcaagaaactgcaggacaagaactgggatcggacccagttcttcaaagccgacctctccccgctcgagtccggatgctgcaagccacccagcagctgcaacttcctctacgtcagcggcacgaactggacgaaggtgcccaccaactcgtcggacccggactgcaacacgtgggtcgacgacggcacgcagctgtgctacaactgccagtcgtgcaaggccggcgcggtggcgaccctgaagcgggactggaagcgcgtcgccgtcgtctgcatcgtcttcctcgtcttcatcgtcatcgtctactccctcggctgctgcgcgttcaggaacaaccggagggacaaccgcggcgcctatcgcggtgccgcgtggaagggcggatacgcctga

SEQ ID NO: 20 - protein, 276 aa, Oryza sativa
MAFRLSNSLLGILNAVTFLLSVPVLGGGIWLATRADGTECERYFSAPVIAFGVFLLLVSLAGLVGACCRVNCLLWFYLVAMFVLIVVLFCFTVFAFVVTNKGAGEAVSGRGYKEYRLGDYSNWLQKRMENSKNWNRIRSCLQDSKVCKKLQDKNWDRTQFFKADLSPLESGCCKPPSSCNFLYVSGTNWTKVPTNSSDPDCNTWVDDGTQLCYNCQSCKAGAVATLKRDWKRVAVVCIVFLVFIVIVYSLGCCAFRNNRRDNRGAYRGAAWKGGYA

SEQ ID NO: 21 - DNA, 2727 bp, Oryza sativa
  CDS (1)..(2727)
ataaaaagacttcaccttctgctcacagtgaaggaatctgctatggatgttcctacaaacctggatgctagaaggcggatatcattctttgctaattctcttttcatggacatgccaagtgctccaaaagtccggcacatgttgcccttctctgtcttgactccttactacaaagaagatgtccttttctcttcccaagcattagaagaccagaatgaagatggggtttctattcttttttacttgcaaaaaatctatccagatgaatggaaacatttccttcaaagggtggattgcaatactgaagaggaactccgtgagacagagcagttggaagatgagcttcgcctttgggcatcatacaggggccaaactttgacgagaactgtcagagggatgatgtactacagacaagctttggtgcttcaggcttttcttgatatggctagagatgaagatcttagggaaggcttcagagcagctgacctcttaaatgatgaatcaccattactgactcaatgcaaagctatagctgacatgaagtttacatacgttgtatcatgccaacaatacggtatccagaaacgttctggtgatcaccgtgcacaagatattcttagactgatgacaacttatccatcacttcgggttgcctatattgatgaagttgaagagccaagcaaagacaggaacaagaagatagaaaaggtttactactcagcgttggtgaaggcagctgtaaccaagcctgacgatcctggtcagaaacttgatcaggacatatacagaataaagctaccaggtaatgcaatgctaggtgaaggaaagccagaaaatcagaaccatgcgataatatttactcgaggtgaaggccttcaaactatagacatgaatcaggaacattacatggaggagactttgaaaatgagaaatctgctgcaagagtttctgaagaaacatgatggtgtgaggtatccatcaatacttggtgtgagagagcacatattcactggcagtgtttcttctcttgcgtggttcatgtcaaatcaagagacaagttttgtcactattggacaacgggtacttgccaatcctttgagagttcgatttcattatggacatcctgatatttttgatcgacttttccacctcacgaggggtggtgtaagcaaagcatccaagattatcaatcttagtgaggacatatttgctggattcaactcaacactgcgtgaaggaaatgttacgcatcatgaatacatgcaagttggcaaggggagagatgtgggtctcaatcaaatctcactatttgaggcaaaaatagctaatggtaatggagagcagacactgagccgtgacgtctaccgacttggacatcgttttgatttcttcagaatgttgtcctgctactacaccactattggtttttacttcagcactatgatgacagtgtggacagtgtatgtattcctctatggacgtctctatcttgtcctcagtggtcttgatgaagccttggctactggaaaaaggtttatacacaatgaacctctccaggttgctcttgcttcacagtcttttgtgcagcttgggtttttgatggcgttgcctatgatgatggaaattggtctggagagaggatttagaaccgcattgagcgactttgtactgatgcagctgcagttagcatctgttttctttacattctctctcgggaccaaaactcactactatggaacaacgctgctccatggaggagccgagtatagagctactgggcgtggatttgtggtgttccatgccaaatttgcggagaactatcgactatactcacgcagccattttgtcaagggtattgagttgctgattttgctaattgtgtatgaaatctttgggcaatcatatcgaggagctatcgcgtacatcttcattacattttcgatgtggtttatggttgtaacctggctctttgcaccattcctatttaatccttctgggttcgagtggcagaagattgtggatgattggactgattggaataagtggatcagcaaccgtggtggtattggtgtaccaccggagaaaagttgggagtcatggtgggagaaagagcaggagcctataaaatattctgggaagcgtggaattgttctcgaaatagtgcttgcattgcgcttctttatctaccaatatggtcttgtttatcacttgaacataaccaaacacacaaagagtgtcctggtctattgcctgtcatgggttgtcatctttgtaattctgcttgtgatgaagaccgtgtcagttgggaggcggaaattcagcgcggacttccaacttgtgttccggttgattaaggggttgatatttataacatttatctccatcattataatcttgatagcaatccctcatatgacagtccaggacatctttgtttgcattcttgccttcatgccaactggctggggtctgctgttggttgcgcaagctatcaagccagtaattgtgcgcatcgggttgtggggatcgatcaaggcgcttgcgaggggatatgagatcatcatggggctcctgctcttcaccccgatcgcgttcctcgcttggttcccgtttgtatccgagttccagaccagaatgctcttcaaccaggccttcagcagaggtctgcagatctcgcgaatccttggcggccacaagaaagaccgagctacacggaacaaggagtag

SEQ ID NO: 22 - protein, 908 aa, Oryza sativa
IKRLHLLLTVKESAMDVPTNLDARRRISFFANSLFMDMPSAPKVRHMLPFSVLTPYYKEDVLFSSQALEDQNEDGVSILFYLQKIYPDEWKHFLQRVDCNTEEELRETEQLEDELRLWASYRGQTLTRTVRGMMYYRQALVLQAFLDMARDEDLREGFRAADLLNDESPLLTQCKAIADMKFTYVVSCQQYGIQKRSGDHRAQDILRLMTTYPSLRVAYIDEVEEPSKDRNKKIEKVYYSALVKAAVTKPDDPGQKLDQDIYRIKLPGNAMLGEGKPENQNHAIIFTRGEGLQTIDMNQEHYMEETLKMRNLLQEFLKKHDGVRYPSILGVREHIFTGSVSSLAWFMSNQETSFVTIGQRVLANPLRVRFHYGHPDIFDRLFHLTRGGVSKASKIINLSEDIFAGFNSTLREGNVTHHEYMQVGKGRDVGLNQISLFEAKIANGNGEQTLSRDVYRLGHRFDFFRMLSCYYTTIGFYFSTMMTVWTVYVFLYGRLYLVLSGLDEALATGKRFIHNEPLQVALASQSFVQLGFLMALPMMMEIGLERGFRTALSDFVLMQLQLASVFFTFSLGTKTHYYGTTLLHGGAEYRATGRGFVVFHAKFAENYRLYSRSHFVKGIELLILLIVYEIFGQSYRGAIAYIFITFSMWFMVVTWLFAPFLFNPSGFEWQKIVDDWTDWNKWISNRGGIGVPPEKSWESWWEKEQEPIKYSGKRGIVLEIVLALRFFIYQYGLVYHLNITKHTKSVLVYCLSWVVIFVILLVMKTVSVGRRKFSADFQLVFRLIKGLIFITFISIIIILIAIPHMTVQDIFVCILAFMPTGWGLLLVAQAIKPVIVRIGLWGSIKALARGYEIIMGLLLFTPIAFLAWFPFVSEFQTRMLFNQAFSRGLQISRILGGHKKDRATRNKE

SEQ ID NO: 23 - DNA, 975 bp, Oryza sativa
  CDS (1)..(975)
cacgcgtccgggtccgggtcggtgcgggagcggttcgaggccatgatccgccgcgtgcagggggaggtgtgcgcggcgctggaggaggccgacgggagcggcgcccggttcgtggaggacgtgtggtcgcgccccggcggcggcgggggcatcagccgggtgctccaggacggccgcgtgttcgagaaggccggggtcaacgtctccgtcgtgtacggcgtcatgccccccgacgcgtaccgcgccgccaagggggaggccggcaagaacggcgcggcggcagatggccccaaggctgggcccgtgcccttctttgccgctggcattagctcggttcttcaccccaagaacccatttgctccaacattgcattttaactaccgctattttgagacagatgcaccgaaagatgctcctggtgcaccaaggcaatggtggtttggaggtggtactgatttgactccttcatatatcattgaagaggatgtgaagcattttcattctgttcaaaaacaagcgtgtgataagtttgacccaagtttttacccgagattcaaaaaatggtgtgatgattatttctatattaagcaccgtaatgagcgtcgggggcttggtggaatattttttgatgatcttaatgactatgatcaagaaatgcttctcaactttgctacagaatgtgcggattctgttgttcctgcatacataccaatcattgaacgccggaaggacactccatttactgaggaacacaaggcatggcaacaactgaggagaggtcgctatgtggagttcaaccttgtatatgatcgcggtaccacatttggcctcaagactggggggaggattgagagtattctggtttctcttccactgactgcacgatggcagtattatcatacacctgaagagggaactgaagaacggaaacttcttgacgcgtgcataaacccaaaggaatggctcgatctctga

SEQ ID NO: 24 - protein, 324 aa, Oryza sativa
HASGSGSVRERFEAMIRRVQGEVCAALEEADGSGARFVEDVWSRPGGGGGISRVLQDGRVFEKAGVNVSVVYGVMPPDAYRAAKGEAGKNGAAADGPKAGPVPFFAAGISSVLHPKNPFAPTLHFNYRYFETDAPKDAPGAPRQWWFGGGTDLTPSYIIEEDVKHFHSVQKQACDKFDPSFYPRFKKWCDDYFYIKHRNERRGLGGIFFDDLNDYDQEMLLNFATECADSVVPAYIPIIERRKDTPFTEEHKAWQQLRRGRYVEFNLVYDRGTTFGLKTGGRIESILVSLPLTARWQYYHTPEEGTEERKLLDACINPKEWLDL

SEQ ID NO: 25 - DNA, 882 bp, Oryza sativa
  CDS (1)..(882)
atggaggtggggttcctggggctgggcatcatggggaaggcaatggcggccaacctcctccgccacggcttccgcgtcaccgtctggaaccggactctctccaagtgccaggagctcgtcgcgctgggcgccgccgtgggggagacgccggcggccgtcgtcgccaagtgcagatacaccatcgccatgctctccgaccccagcgccgcgctatctgttgtattcgacaaggacggcgtgctcgagcagattggggaagggaagggttatgtggacatgtccactgttgatgccgccacttcttgcaagataagcgaggctataaaacaaaaaggtggggcttttgttgaagctccagtttcaggaagcaaaaagccagctgaagatggccaattggtcattcttgctgcaggggacaaggtattgtatgatgatatggtccctgcatttgatgtacttgggaaaaagtcgttctttttgggagagattggaaatggagcaaagatgaaactggtggtcaacatgatcatgggaagtatgatgaatgctttgtctgagggactctctctggctgataacagtggtttgagcccccagacacttcttgatgtcctggaccttggcgccatcgcgaatccaatgttcaagctgaaagggccctcgatgctgcaaggcagctacaaccctgcatttcccctgaaacaccagcagaaggatatgaggttggcacttgccctaggagacgagaacgctgtctccatgccagtggcagctgcttccaacgaggcgttcaagaaagcaagaagcttgggactaggggacctggatttctcagcggtttacgaggtactgaagggcgcaggtggctcaggcaaggcgtga

SEQ ID NO: 26 - protein, 293 aa, Oryza sativa
MEVGFLGLGIMGKAMAANLLRHGFRVTVWNRTLSKCQELVALGAAVGETPAAVVAKCRYTIAMLSDPSAALSVVFDKDGVLEQIGEGKGYVDMSTVDAATSCKISEAIKQKGGAFVEAPVSGSKKPAEDGQLVILAAGDKVLYDDMVPAFDVLGKKSFFLGEIGNGAKMKLVVNMIMGSMMNALSEGLSLADNSGLSPQTLLDVLDLGAIANPMFKLKGPSMLQGSYNPAFPLKHQQKDMRLALALGDENAVSMPVAAASNEAFKKARSLGLGDLDFSAVYEVLKGAGGSGKA

SEQ ID NO: 27 - DNA, 1032 bp, Oryza sativa
  CDS (1)..(1032)
gcttctgaggaatcaacaacagccaacttagtggggcagatcacaaccacctgtacagatgatatttctgtgaacagatcagcagaaaattcttcacagaagaacattccattggatggagtatctgcacagtccattaagccatctgcaagtagtaggtctgaaccagtaggtcttggtggaggtttgcagcctaagaggcggagcagaacagcaaagccacctgggagtagcagtgatactggcgaagtcgtcaattcctctcgcatcagcaatagccaaaatgctgtttcaatgggccagcaggttctgcaagcccttgcttctcaaaatactaatgtaaacagaagccatgttacggattctccacttccatccactacttctcagttttctggtggaatgcctccgagaagacagggtggtgaaggacaagttgattttggcagtatgatatccagtgtgctaaacaacccagcttttggcaatctgttgtccaatgtagcagagcaaacaggcatgggttccgcaggtgatttgagaaacatggtggaagagtgtgcacagagccctgcaataatggatactatgagtaatttagtccaaaatgtggatgggtcaggaagaggtcaaggtggcattgacttgtctagaatgatgcagcaaatgatgcctgttgtatcccaagttcttggtggagctggggctcgtcctgctggtacaaatagtggacaatccagattgcagcctcggcgcagtgacatgagagtggatgatgcttcagattatggaaattctcagattgatctacaccaagctcgtgaacacattgagcaacatgactcccccagggatatcttcggtgcggtcctcgaaactgctgcacaggcttatggtgaagatgagagtattgaggacatgcttgaagagcttgtcagtgacccagaacttacagatgactacctgaaacttctgctccaacaagttcgccagaggatacagtcggcatctcaatccgggaaccagtcttga

SEQ ID NO: 28 - protein, 343 aa, Oryza sativa
ASEESTTANLVGQITTTCTDDISVNRSAENSSQKNIPLDGVSAQSIKPSASSRSEPVGLGGGLQPKRRSRTAKPPGSSSDTGEVVNSSRISNSQNAVSMGQQVLQALASQNTNVNRSHVTDSPLPSTTSQFSGGMPPRRQGGEGQVDFGSMISSVLNNPAFGNLLSNVAEQTGMGSAGDLRNMVEECAQSPAIMDTMSNLVQNVDGSGRGQGGIDLSRMMQQMMPVVSQVLGGAGARPAGTNSGQSRLQPRRSDMRVDDASDYGNSQIDLHQAREHIEQHDSPRDIFGAVLETAAQAYGEDESIEDMLEELVSDPELTDDYLKLLLQQVRQRIQSASQSGNQS

SEQ ID NO: 29 - DNA, 447 bp, Oryza sativa
  CDS (1)..(447)
atgggggggaaggagctgagcgaggagcaggtggcgtcgatgcgggaggcgttctccctcttcgacaccgacggcgacggccggatcgcgccgtcggagctcggcgtcctgatgcgctccctcggcgggaaccccacccaggcgcagctccgcgacatcgccgcgcaggagaagctcaccgcgcccttcgacttcccgcgcttcctcgacctcatgcgcgcccacctccgccccgagcccttcgaccgcccgctccgcgacgccttccgcgtcctcgacaaggacgcctccggcaccgtctccgtcgccgatctccgccacgtcctcacctccatcggcgagaagctcgagccccacgagttcgacgagtggatccgcgaggtcgacgtcgcccccgacggcaccatccgctacgacgacttcatccgccgcatcgtcgccaaataa

SEQ ID NO: 30 - protein, 148 aa, Oryza sativa
MGGKELSEEQVASMREAFSLFDTDGDGRIAPSELGVLMRSLGGNPTQAQLRDIAAQEKLTAPFDFPRFLDLMRAHLRPEPFDRPLRDAFRVLDKDASGTVSVADLRHVLTSIGEKLEPHEFDEWIREVDVAPDGTIRYDDFIRRIVAK

SEQ ID NO: 31 - DNA, 1692 bp, Oryza sativa
  CDS (1)..(1692)
atggcctccgccgccgtcatcccgtcgtccgcgcccggcgccgccgccgcaggtgcggccgcggttarragcgctgggtgggtggtggacgagcgggacggcttcatttcatggctgcgcggaaagttcgcggcggccaacgccatcatcgacctgctgctgctccamctycgstccgtcggcgagcccggggagttcgagcacgtcgccgccgcggtgcagcagcggcgccaccactgggcgcccgtgatccacatgcagcagttcttccccgtcggcgacgtcgcgtacgcgctccagcaggccgggtkgcgccgccgcgcgccgccgcaccaccagcagcagggccccggcgcctcgccgtccccgccgccccytcccccgcgcggccgcccctcgttctcggcgtcccactcgcaccatcgccacggtggtcaccatcatcgctccgattcggtgcgcggcggcggcactggtgcgacggctggatccgataaagatggacgtgaagttcataacaaggaagagaaaggaatgaaggaagcagagaatgtggttgaagctaaaagctcacagttggagtctcttgtttctcatgaaggtgaaaaaactcctaggccgcaagctgttgctgaaggaagcagtaaagtggttccaactcctgtggagtatacggtcaatgacattattgatggcaagacggttaatgctgttgaagggcttaaggtttatgaagggttggtaaatgagaatgagaaaaacaagattctctctttacttaatgaaacaaaagcttcttttcgtcgaggagggcttgaagctgggcagactgtaataattggaaaaagaccaatgaagggtcatgggagggaaattattcagctgggcattcctatcgttgaaggccctcctgaagatgactatccaagagagacaaaagtggaggctgttcctggattgctgcatgatctgtttgaccgcttgtgtcagaaggaaattataccaacaaaaccagattattgtgttattgattactacaatgagggggattattctcaccctcaccaatcccctccttggtatggtagacccttttgtacattctgcctgacagattgtgacatggtgttcggccgagttatttcaggagaacgaggtgatcatagaggtcctctgaagctccttctctcgacagggtctcttctggtgttgcatgggaagagtgctgatgttgctaagcgagctattcctgctgcatgtaagcagcggatcctactaagcttcgggaagtctttatcgagaaaacaagtaccatctgaaagtgtttcacggtttactaccccgttgacaccacctcctatgccctggggtcctccaaggccggctaacatggcgcgtcattcttcaagccctaaacactttggatatgccccaaacagtggcgtacttccagcgccggccattggagcgcatcacattcctccatcagatggaatgcagccactctttgtagcacctgctccagttgctgctgcagccatgcctttcccatcacctgttcctttgccaaacttaaccaacagcttggatggcagaagctgctccaaggtctgctccacaacgactcccagttcctggcacgggggtcttccttcctcctggatcgggtcacgcactgcctcatcagatgat

SEQ ID NO: 32 - protein, 564 aa, Oryza sativa
  misc_feature (23)..(23): The 'Xaa' at location 23 stands for Arg, or Lys.
  misc_feature (56)..(56): The 'Xaa' at location 56 stands for Gln, or His.
  misc_feature (57)..(57): The 'Xaa' at location 57 stands for Leu.
  misc_feature (104)..(104): The 'Xaa' at location 104 stands for Trp, or Leu.
  misc_feature (126)..(126): The 'Xaa' at location 126 stands for Pro, or Leu.
MASAAVIPSSAPGAAAAGAAAVXSAGWVVDERDGFISWLRGKFAAANAIIDLLLLXXRSVGEPGEFEHVAAAVQQRRHHWAPVIHMQQFFPVGDVAYALQQAGXRRRAPPHHQQQGPGASPSPPPXPPRGRPSFSASHSHHRHGGHHHRSDSVRGGGTGATAGSDKDGREVHNKEEKGMKEAENVVEAKSSQLESLVSHEGEKTPRPQAVAEGSSKVVPTPVEYTVNDIIDGKTVNAVEGLKVYEGLVNENEKNKILSLLNETKASFRRGGLEAGQTVIIGKRPMKGHGREIIQLGIPIVEGPPEDDYPRETKVEAVPGLLHDLFDRLCQKEIIPTKPDYCVIDYYNEGDYSHPHQSPPWYGRPFCTFCLTDCDMVFGRVISGERGDHRGPLKLLLSTGSLLVLHGKSADVAKRAIPAACKQRILLSFGKSLSRKQVPSESVSRFTTPLTPPPMPWGPPRPANMARHSSSPKHFGYAPNSGVLPAPAIGAHHIPPSDGMQPLFVAPAPVAAAAMPFPSPVPLPNLTNSLDGRSCSKVCSTTTPSSWHGGLPSSWIGSRTASSDD

SEQ ID NO: 33 - DNA, 858 bp, Oryza sativa
  CDS (1)..(858)
atggagggcggcggcgaggtgggctggtacgtgctcggcccgaaccaggagcacgtcggcccctacgcgctctccgagctgcgagaacattttgctaatgggtacatcagtgagagctcaatgctctgggcagaagggaggagtgaatggatgccattgtcgtcgattcctgacctacttgcggtggtcacaaaaaaggatcaacctgatgaaggaattgaagatgatttcgataaatttcaaaaggaggttatagaagctgaggcagaggtggaagcctcgacagacaaggctgcagataacgacataaaccaagaacatggggccgatgatcctgatgaccggccagcaaccccaccagatggcgaggacgaatttactgatgatgatggtactgtttacaagtgggatcgtgtcctgagggcatgggttcctcaagatgacctagaaggcaaaaatgacaactatgaagttgaagacatgacttttgcacatgaggaagaagttttccaagcaccagatattgctggttcaaccacattagaagaaaacaatgtttctgcggaaattgaaatcaaagaaccaccaaaggtagaaaagagagcacataagaagcggaagtcttctgaaaagccagccgataaaaaggaagcttacaaacctccagatagttgggttgatctcaaagttaacacacatgtctacgttactggtttgcctgatgatgtcacagctgaggagattgtggaggtattttccaaatgtggaattataaaggaggacccagagacaagaaaaccccgagtaaaaatctatactgacagagaaacaggcagaaagaaaggtgatgcgctagtg

SEQ ID NO: 34 - protein, 286 aa, Oryza sativa
MEGGGEVGWYVLGPNQEHVGPYALSELREHFANGYISESSMLWAEGRSEWMPLSSIPDLLAVVTKKDQPDEGIEDDFDKFQKEVIEAEAEVEASTDKAADNDINQEHGADDPDDRPATPPDGEDEFTDDDGTVYKWDRVLRAWVPQDDLEGKNDNYEVEDMTFAHEEEVFQAPDIAGSTTLEENNVSAEIEIKEPPKVEKRAHKKRKSSEKPADKKEAYKPPDSWVDLKVNTHVYVTGLPDDVTAEEIVEVFSKCGIIKEDPETRKPRVKIYTDRETGRKKGDALV

SEQ ID NO: 35 - DNA, 1251 bp, Oryza sativa
  CDS (1)..(1251)
atggcgaggcgctctccttgcctcgccgtcgccatgctcctgcttggggcgttggcggtggcgagcgccttcattgatgaagcggcggctgctggccgggggctcggccatggcgcccgcttcatgagcaagcagggtcgtgtgacatacgagaagctgccggagccggagccgaagccaaagccaaagcctcatcctaaacccacgccaaaacctgagcccaagccagagccggagccaaaaccagtacctgagcctgagcctaaaccggaaccaaagccagaaccaaaacctgagcctaagcctgaacctaaaccatacccagagccaaaaccggagccgaagccagagccaaaacctgagccggagcctaaacctgagcctaagccagaaccaaaaccagaaccaaagccgtacccagagccgaagccagagccaaaaccggaaccgaagccggaaccaaaaccggagcccaaaccaaagccagagcccaaaccacacccagaaccaaagcctgatccgaaacctgagcctaagccacacccagagcctgagcctaagcctgaacctaagcctgagcccaagccacaccctgagcctgaaccaaagcctgagcctaagcctgagccaaagccagaaccaaagccggagccaaaacctgaaccaaaaccaaagccaaagccagagccaaagccaaagcctgagcccaagccataccctgagcctaagcctaagcctgaaccaaagcctgagcctaagcctgagccaaagccagaaccaaagccggagccaaaacctgaaccaaaaccagagccaaagccagagccaaagccaaagcctgagcccaagccacaccctaagcctgagcctaagcctgagcccaagccagaaccaaagccagagccaaaacctgaaccaaaaccagagccaaaaccagagcctgaaccgaagcctgagccaaagcctgaaccaaaaccagagcccaaaccatatccagagcctaaaccggatcccaaaccagaacccaaaccacacccagaaccaaagccagagcccaagccacagccggagccaaaaccagagccgaagcctgaacctaaaccagagcctaagcccgaaccaaaaccggagcctaaaccatacccagagccaaagcctgaaccgaaacctaagcctaagcctgagccaaaacctgaagcacctccgaagaagcacaagccgccgcacataccgccagcgaccgaccagtga

SEQ ID NO: 36 - protein, 416 aa, Oryza sativa
MARRSPCLAVAMLLLGALAVASAFIDEAAAAGRGLGHGARFMSKQGRVTYEKLPEPEPKPKPKPHPKPTPKPEPKPEPEPKPVPEPEPKPEPKPEPKPEPKPEPKPYPEPKPEPKPEPKPEPEPKPEPKPEPKPEPKPYPEPKPEPKPEPKPEPKPEPKPKPEPKPHPEPKPDPKPEPKPHPEPEPKPEPKPEPKPHPEPEPKPEPKPEPKPEPKPEPKPEPKPKPKPEPKPKPEPKPYPEPKPKPEPKPEPKPEPKPEPKPEPKPEPKPEPKPEPKPKPEPKPHPKPEPKPEPKPEPKPEPKPEPKPEPKPEPEPKPEPKPEPKPEPKPYPEPKPDPKPEPKPHPEPKPEPKPQPEPKPEPKPEPKPEPKPEPKPEPKPYPEPKPEPKPKPKPEPKPEAPPKKHKPPHIPPATDQ

SEQ ID NO: 37 - DNA, 711 bp, Oryza sativa
  CDS (1)..(711)
atggccggcgccgacgtggacgtcgggacggagctccggctggggctgcccggaggtggcggcggcgccgccgaggcggcggccaaggccgcgaagaggggcttcgaggagaccattgacctgaagctgaagctgcccaccgccggcatggaggaggccgccgccggcaaggcggaggcgccggccgccgagaaggccaagaggccggcggaggccgccgccgccgacgccgagaagccacctgctcccaaggcgcaggcagtgggttggccaccagttcggtcgttccgcaggaatatcatgaccgtccagtcagtgaagagcaagaaggaagaggaagctgacaagcagcagcagcagcccgctgccaatgccagcggcagcaacagctctgccttcgtgaaggtcagcatggacggggcaccctacctgcgcaaggtggacctgaagatgtacaacagctacaaggacctctcccttgctctgcagaagatgttcggcaccttcaccgcaactgggaacaatatgaatgaggtgaatggctctgatgctgttacaacttatgaagacaaggatggtgactggatgcttgttggagatgtcccgtggcagatgtttgtcgagtcatgcaaacgcttgaggatcatgaagggttccgaagccattggtcttgcaccaagagcaaaggacaagtacaagaacaagagctga

SEQ ID NO: 38 - protein, 236 aa, Oryza sativa
MAGADVDVGTELRLGLPGGGGGAAEAAAKAAKRGFEETIDLKLKLPTAGMEEAAAGKAEAPAAEKAKRPAEAAAADAEKPPAPKAQAVGWPPVRSFRRNIMTVQSVKSKKEEEADKQQQQPAANASGSNSSAFVKVSMDGAPYLRKVDLKMYNSYKDLSLALQKMFGTFTATGNNMNEVNGSDAVTTYEDKDGDWMLVGDVPWQMFVESCKRLRIMKGSEAIGLAPRAKDKYKNKS

SEQ ID NO: 39 - DNA, 1257 bp, Oryza sativa
  CDS (1)..(1257)
acgcgtccggacttcgataagaaagttgtggattggcttgctagcaactttaagaaagatgaaggcattgatcttctgaaagacaaacaagccctgcagcgactcactgaggcagcagagaaagcgaagatggaactgtctacgctgtctcagacaaacattagcttgcctttcataactgctactgctgatgggcctaaacacatcgagacaactctctccagagccaaatttgaggagctatgttcggacctcattgataggcttaaaactcctgtcactaatgccttgagagatgccaaactgtctgttgataacctggacgaagtgattcttgttggtggatccactcgtatcccttccgtgcaagagcttgtgaagaagatcactggcaaggatcccaatgtcacagtcaaccctgatgaggttgtttctcttggggcagctgtacagggtggagttttggccggagatgtgaaagatgtcgttcttcttgatgttactccattgtctcttggtctggagacgttgggtggagtgatgaccaagattattcccagaaacacaacactgcccacctcaaaatcagaggtattctccacagctgcagatggacagacaagtgttgagataaatgttcttcagggagagagagagtttgtccgggacaacaagtctcttggaagcttccgcttggatggaatcccctccctgcaccacgtggtgttccacaaattgaagtcaagtttgatattgatgccaatggtatctcttctgttgctgctattgataagggtactgggaagaaacaggatatccccatcaccggcgcttagtacactgccaaaggatgaggttgagagaatggtggaagaggctgacaagtttgctcaggaggacaaagagaaaagagatgccattgataccaaaaaccaggcagactctgtggtctaccagactgagaagcaactgaaggagctaggtgacaaggtacctgcacctgtgaaagagaaggtggatgcaaagctcaacgagctcaaagaggccattgcgggtggatcaacacagagcatgaaggatgccatggctgctttaaacgaggaagttatgcagatcggccaggccatgtacaaccagcagcctaatgctggtgctgctggacctactcctggtgccgatgctggaccgacaagctcaggcggtaagggaccgaatgatggagatgttattgatgcggatttcactgacagcaattga

SEQ ID NO: 40 - protein, 418 aa, Oryza sativa
TRPDFDKKVVDWLASNFKKDEGIDLLKDKQALQRLTEAAEKAKMELSTLSQTNISLPFITATADGPKHIETTLSRAKFEELCSDLIDRLKTPVTNALRDAKLSVDNLDEVILVGGSTRIPSVQELVKKITGKDPNVTVNPDEVVSLGAAVQGGVLAGDVKDVVLLDVTPLSLGLETLGGVMTKIIPRNTTLPTSKSEVFSTAADGQTSVEINVLQGEREFVRDNKSLGSFRLDGIPSLHHVVFHKLKSSLILMPMVSLLLLLLIRVLGRNRISPSPALSTLPKDEVERMVEEADKFAQEDKEKRDAIDTKNQADSVVYQTEKQLKELGDKVPAPVKEKVDAKLNELKEAIAGGSTQSMKDAMAALNEEVMQIGQAMYNQQPNAGAAGPTPGADAGPTSSGGKGPNDGDVIDADFTDSN

SEQ ID NO: 41 - DNA, 1557 bp, Oryza sativa
  CDS (1)..(1557)
atggtggttcttgcagcttctattatatcgaagtctggaaaagctcttgtttcgagacaatttgttgacatgtcccggataaggatcgatgggctgcttgcagcatttccgaagctggtcggaagtggaaagcaacatacttatgttgagactgaaaatgttcgttatgtctatcaaccaattgaagcactgtatttgcttctcatcacaaataagcaaagtaacattcttgaagatctggatactttaaggctactctccaagcttatacctgaatatgctccctctttggatgaagagggtgtctgtaaggcagcattcgagcttctgtttgcctttattgaagccatttctcttggaaacaaagagaacgtaactgttgcacaagttaaacaatactgtgaaatggagagccatgaagaaaagctgcacaagctggttatgcaaagcaaaataaatgaaactaaggatgtcatgaggaggaaagtcactgagattgagaaaagcaagactgatagagggaagcctgacaagggaggatttggatccttgagaactccaaacagcttcagtgacatgggcattagaggtggtggtccagggggcgatcctatatttggtgatatggactcgttcacccacaaggccaaaggccgcccatctgctcctgctcctgcatctgcttctactaaagttcctggtggtatgaaattaagcaaagcacagaagacaaaccagttccttgagtctttgaaagctgaaggagaagtcattttggaggacactcaaccaagtgcaactcaatcaaggtcatcatatatcccaccaagcgatcctatcacagtgacaattgaagagaagctcaatgtcactgttaaaagggatgggggagttagcaattttgatattcaaggaaccctggctctccaaattctgaatgacactgatggttttattcagttacagattgagaaccaagatgtacctggccttaacttcaagacacaccccaatatcaacaaagagttattcaacagtcaacaaattgtgggggcaaaagatccaaacaggcctttccccagtggtcaaaatgaaacaccgttggtgaaatggagaatccaggagttgaatgagtcatctcttccattggcagtgaactgttggccttcggtgtccggaaatgaaacctatgtgaacattgaatatgaagcttcagagatgtttgatttgcacaatgttgtcatctctatccctctccccgcacttagggaggctccaggtgttaggcagatagacggagaatggaggtatgactcaagaaattcagtgttggagtggtccattattcttgttgatcaatcaaaccgcagtggttctttggagttcactgtccctgcagctgatccatcaacattcttcccgatatctgttgggttttctgcatcaaatacatttagtgatttgaaggtgaccgccatccgtccgctgagggaaggtagcccaccaaagttttctcagaggaatcgattggttacttataactaccaagtggtttga

SEQ ID NO: 42 - protein, 518 aa, Oryza sativa
MVVLAASIISKSGKALVSRQFVDMSRIRIDGLLAAFPKLVGSGKQHTYVETENVRYVYQPIEALYLLLITNKQSNILEDLDTLRLLSKLIPEYAPSLDEEGVCKAAFELLFAFIEAISLGNKENVTVAQVKQYCEMESHEEKLHKLVMQSKINETKDVMRRKVTEIEKSKTDRGKPDKGGFGSLRTPNSFSDMGIRGGGPGGDPIFGDMDSFTHKAKGRPSAPAPASASTKVPGGMKLSKAQKTNQFLESLKAEGEVILEDTQPSATQSRSSYIPPSDPITVTIEEKLNVTVKRDGGVSNFDIQGTLALQILNDTDGFIQLQIENQDVPGLNFKTHPNINKELFNSQQIVGAKDPNRPFPSGQNETPLVKWRIQELNESSLPLAVNCWPSVSGNETYVNIEYEASEMFDLHNVVISIPLPALREAPGVRQIDGEWRYDSRNSVLEWSIILVDQSNRSGSLEFTVPAADPSTFFPISVGFSASNTFSDLKVTAIRPLREGSPPKFSQRNRLVTYNYQVV

SEQ ID NO: 43 - DNA, 960 bp, Oryza sativa
  CDS (1)..(960)
atggcggggtcgtcgtccctcagcacgctctccctctgcacgcagtcgccatcaccgtcaccggtggcgtccggccgcctcgtggcaccggctgtcctcggtttcgccggggccccgcggttcccgacgctgcgggccgcgccacggcggctgacggcgcgggcggtggccggggacgccgaggacgagtkggggaaggagccggcggcggaccagggcggtgccgccgcggcggtggccgaggcgcccgcggatgtgccggtgacgagcgaggtcgcggagctcaaggcgaagctgaaggaggcgctgtacggtacggagcgcggcctgcgcgcgtccagcgagacgcgcgcggaggtggtcgagctcatcacgcagctcgaggcccgcaaccccacgccggcgcccaccgaggcgctcaccctcctcaacggcaagtggatcctcgcgtacacctcattttcacagctattcccactattggggtctggtagtttgcctcagcttgtcaaggtggaagaaatatcacaaactattgattctgagaacttcacggttcagaattgcatcaagttttcaggacctttagcaacaacttcagtgtctaccaatgccaaatttgaagttcgaagtcccaaacgtgtacagatcaaatttgatgaaggcattatcggcactccacaattgactgattctattgtactacctgagaagtttgagttatttgggcagaatattgacctgaccccattgaagggcatattttcatcaattgaaaatgcagcatcctcagttgctagaaccatctctggtcaacctccactaaagataccaattaggactgacaatgctgagtcttggttgctcacaacctaccttgatgatgagcttagaatctccagaggtgatggcagcagcatctttgtactgtttaaggaaggaagcaccctcctatattaa

SEQ ID NO: 44 - protein, 319 aa, Oryza sativa
  misc_feature (64)..(64): The 'Xaa' at location 64 stands for Trp, or Leu.
MAGSSSLSTLSLCTQSPSPSPVASGRLVAPAVLGFAGAPRFPTLRAAPRRLTARAVAGDAEDEXGKEPAADQGGAAAAVAEAPADVPVTSEVAELKAKLKEALYGTERGLRASSETRAEVVELITQLEARNPTPAPTEALTLLNGKWILAYTSFSQLFPLLGSGSLPQLVKVEEISQTIDSENFTVQNCIKFSGPLATTSVSTNAKFEVRSPKRVQIKFDEGIIGTPQLTDSIVLPEKFELFGQNIDLTPLKGIFSSIENAASSVARTISGQPPLKIPIRTDNAESWLLTTYLDDELRISRGDGSSIFVLFKEGSTLLY

SEQ ID NO: 45 - DNA, 126 bp, Oryza sativa
  CDS (1)..(126)
gcgccgtcaagctcatctggaaccacatcaaggccaacggcctccagaacccagcaaacaaaagggagattaactgtgacgataagcttaaaagcttattcgccgggaaggacaaggtcgggatga

SEQ ID NO: 46 - protein, 41 aa, Oryza sativa
APSSSSGTTSRPTASRTQQTKGRLTVTISLKAYSPGRTRSG

SEQ ID NO: 47 - DNA, 692 bp, Oryza sativa
  CDS (1)..(690)
gtcgccgtgcgcaagaaggagacgcgcgacggcgccatgcagaccatgccgtcgcgcgtgcagcagggcgccgccgacttcgaggagacgctcttcgtgcgctgccacctctactgcagcggcggcgccggcaccggcaagccgctcaggttcgagccccggccgttcctcctgtcggcggtggccgtggaagcccccgagctcgactttggccggagcgccgtcgacctgagcctcctcgtgaaggagtccacggacaagagccagcaaggggagcgtgtccggcaatgggacatggcgttgccgctcgccgggaaggcgaagggcggcgagctcgtcgtcaaactgtcgttccagatcatggacgacggcggcgtcgggctgttcaaccagaccggagcagcaaccaagattaactcgtcgtcgtcgtcttcttccttgtttgcacggaagcagagcaagctatccttcagcatcacgagcccgaaggtgtcgcggtcggagccgaagctgacgccgacaaagggctcgccgtcgccggacttgcgaggcattgacgacttcaagctcgacgagcccagtttgccatcgctggcagaggccaagcaagagcagaaggagccagagccgccggagccggaggagaaggtcgatgactcggagttcccggagttcgacgtagtggacaaagg

SEQ ID NO: 48 - protein, 230 aa, Oryza sativa
VAVRKKETRDGAMQTMPSRVQQGAADFEETLFVRCHLYCSGGAGTGKPLRFEPRPFLLSAVAVEAPELDFGRSAVDLSLLVKESTDKSQQGERVRQWDMALPLAGKAKGGELVVKLSFQIMDDGGVGLFNQTGAATKINSSSSSSSLFARKQSKLSFSITSPKVSRSEPKLTPTKGSPSPDLRGIDDFKLDEPSLPSLAEAKQEQKEPEPPEPEEKVDDSEFPEFDVVDK

SEQ ID NO: 49 - DNA, 1503 bp, Oryza sativa
  CDS (1)..(1503)
ctggacgaggtgatggcggtgagccccgtggggctagggcggcggtcgcggcagatattcgacgaggtgtggcgcaagttctcgcggctggggcagatgtcgagcgcgtcgtcgacggcgctggcggaggaggagcaggccgtgctcatccgcggcggacccatgtgcgagttcaccgtccccggcgcgcaggacaccaccgtcctcgtcgtcggcgccaccagccgcatcggccgcatcgtcgtccgcaagctcatgctccgcgggtacaatgtcaaggctttagttagaaggaatgatgctgaagtgatagatatgctcccaaggtcggtggatattgttgtcggtgatgttggtgatccttcaactgtcaaatcggctgtatcaggttgcagcaagataatctattgcgcaactgcacgctcaactattactggagacctaaatagggttgataatcaaggagtaaggaatgttagtaaggctttccaggattactacaatgaattggctcagcttagggctggtaaaagcagcaagagcaaactcctgatagcaaaatttaaatctcccaagtctctgaatggttgggaggtggaccagggatcttattttccaaacacatttgcttctaggtttgatgaaggtatcgatgcatcatttgacttttcagaggctggtcaagctgttttctcaggatttgttttcacaagaggtggatatgttgagatatcaaaaaggctatctcttcctttgggatctactctagacaggtatgatggcttacttttttcggtgggaggaaatggaagatcatatgttgttattcttgagactggtccgctggctgacacctcccagagcaagaagtactttgctcggatgactacaaaagtaggattttgtagggtgagggtaccattttcagcttttcggccagtaaaccctcaagatcctcccctagacccttttcttgtgcatacactaacaattaggtttgaacccaaaagacagagacctggtgatggatctcaaagtgctactgaccccagaaattttgagcttatattggaatacatcaaagctttgcctactggtcaagaaacagacttcattctggtctcatgctcaggttctgggattgaacctaacagaagagaacaagtcctcaaagcaaaaaaggctggagaggatgcattgagaaggtcaggccttggatacacaatagtacgccctggtccactgcaggaagaacctggtggtcagcgtgcattgatctttgatcaagggaacagaatctcgcagggtatcagttgcgccgatgtagcagatatttgtgtcaaagcattgcatgattccactgctaggaacaaaagttttgatgtatgctacgagtatgtagctaagcaagggaatgagctatatgaacttgtggcccatttaccagataaagctaacaactatcttacaccggcattatctgttctagagaagaacacctga

SEQ ID NO: 50 - protein, 500 aa, Oryza sativa
LDEVMAVSPVGLGRRSRQIFDEVWRKFSRLGQMSSASSTALAEEEQAVLIRGGPMCEFTVPGAQDTTVLVVGATSRIGRIVVRKLMLRGYNVKALVRRNDAEVIDMLPRSVDIVVGDVGDPSTVKSAVSGCSKIIYCATARSTITGDLNRVDNQGVRNVSKAFQDYYNELAQLRAGKSSKSKLLIAKFKSPKSLNGWEVDQGSYFPNTFASRFDEGIDASFDFSEAGQAVFSGFVFTRGGYVEISKRLSLPLGSTLDRYDGLLFSVGGNGRSYVVILETGPLADTSQSKKYFARMTTKVGFCRVRVPFSAFRPVNPQDPPLDPFLVHTLTIRFEPKRQRPGDGSQSATDPRNFELILEYIKALPTGQETDFILVSCSGSGIEPNRREQVLKAKKAGEDALRRSGLGYTIVRPGPLQEEPGGQRALIFDQGNRISQGISCADVADICVKALHDSTARNKSFDVCYEYVAKQGNELYELVAHLPDKANNYLTPALSVLEKNT

SEQ ID NO: 51 - DNA, 2688 bp, Oryza sativa
  CDS (1)..(2688)
atgatacgggcgatacgcgcgtgcaagacggcggcggaggagcgggcggtggtgcggcgggagtgcgcggcgatacgggcggccatcagcgagggggaccaggactaccgccaccggaacatggccaagctcatgttcatccacatgctcgggtaccccacccacttcggccagatggagtgcctcaagctcatcgccgccgcgggcttccccgagaagcgcatcgggtacctcggcctcatgctgctgctcgacgagcggcaggagaatgctatgttctgctttgagcatttggtagtacttaacgcggacagagatcttaaccactcgaaccagttcattgtggggcttgcactctgtgctcttggcaacatttgctccgctgaaatggcgcgtgatctgtcacctgaggtggagaggctattgcaaagtagggaaccaaataccaagaagaaggctgccttatgctctataaggatcgtacggaaggttccagatttggcagagaacttcatgggctctgctgtttcactactgaaggaaaaacatcacggggttctcatatctgctgttcagctctgcgcagaactttgtaaagcaagcaaagaggcattggagtacctgaggaagaactgccttgatggtttggtcagaatactgagagatgtgtccaatagttcatatgctcctgaatatgacattgctggaattacggatccgttcttgcatatcagagtgcttaagctcatgcgaattttgggtcaaggagatgcagattgcagtgagtttgtgaatgatattcttgctcagctgtgctctgtatcttatatcgaattatttgcattgcatttccaggttgcaacaaaaactgagtcaaataagaacgcaggaaatgctattttatatgaatgtgttgagactataatgggcatcgaagctactagtggtttacgtgtgctggcaatcaatatcttgggtagatttctgtccaaccgtgataataacatcagatatgttgctctgaacatgcttatgaaggccatggaggtagacacgcaagcagtgcagaggcatagagcaacaatattagagtgtgtcaaggatgctgatgtatctattcgcaaaagggcccttgaacttgtttaccttcttgtcaacgatgcaaatgcaaaatctttgaccaaggagcttgttgattacctggaagtaagtgatcaggacttcaaggacgacctcacagcaaagatatgctcaattgttgaaaagttttcccaagataaactttggtacttagaccagatgttcaaggttttatctctggctggaaattatgtgaaggacgatgtatggcatgctctaatagtcttaataagcaatgcatctgaactccaaggatactcagtgagatcattatacaaggcattgctagcttgcggtgaacaggaaagtttggttagggtagctgtatggtgcattggtgagtatggtgaaatgctggtgaacaatgttggtatgctggacatagaggaaccaatcacggtaacagaatctgatgccgtggatgctgtagaggtctctcttaaacgatactctgcagacgtgacaactcgggctatgtgtctagtatctctcttgaagctctcttcccgattcccaccgacttcagaatcatctttgcttgagcggatgcctgtgatagatgaagctagttacttggctaagagagctgcttccacacaagcaactatttcatcagataaattagctgctgcagcaactcctggaagctcgcttaagcttccaaatggtgtagcaaagccaccaccggctcctctagctgatttgcttgatttaagttctgacgatgctcctgcgactacttccgcccctactacagcacctaatgatttcctacaggatcttttgggcataggcttgactgatacatctacagcaggttttgatcttacttttttgttcattcagtacatatttggtttgacaagtgaagcaagtgatgctcatattctcacatttgatactcatttatgtggagctccatcagcaagcacagatattctgatggatcttctatcaattggttcttctccagtacaaaatggcccaccaacagtatcaaactttagccttcctggtcaagatgagaatacagcttacccgccaatcacagctttccagagtgcagctttgaagatcactttcaattttaagaagcagtctggaaaacctcaggagactacaattcatgctagctttacaaatttgacatctaatacattcacggatttcatctttcaggcagctgtaccaaagtttatccagttgcgtttggaccccgctagcagcaacacgcttcctgccagtggaaatgattctgttacacaaagcctcagtgtcacaaataaccaacatggacagaaaccccttgcgatgcgtatccggataacttacaaagtgaacgacaaactcatcatgaatcggaggagatgctcgacaaaatatgacctggtaaagcactcgagtctcctggccatcgaggcgataaaccctcccttgtaccgaagtgaacgagcactagtgcacgagtacttagcctgtgtctatcgctttcggccgtttcgaaacgctcccgtccaagcaataagacgagacgtggctgagatataa

SEQ ID NO: 52 - protein, 895 aa, Oryza sativa
MIRAIRACKTAAEERAVVRRECAAIRAAISEGDQDYRHRNMAKLMFIHMLGYPTHFGQMECLKLIAAAGFPEKRIGYLGLMLLLDERQENAMFCFEHLVVLNADRDLNHSNQFIVGLALCALGNICSAEMARDLSPEVERLLQSREPNTKKKAALCSIRIVRKVPDLAENFMGSAVSLLKEKHHGVLISAVQLCAELCKASKEALEYLRKNCLDGLVRILRDVSNSSYAPEYDIAGITDPFLHIRVLKLMRILGQGDADCSEFVNDILAQLCSVSYIELFALHFQVATKTESNKNAGNAILYECVETIMGIEATSGLRVLAINILGRFLSNRDNNIRYVALNMLMKAMEVDTQAVQRHRATILECVKDADVSIRKRALELVYLLVNDANAKSLTKELVDYLEVSDQDFKDDLTAKICSIVEKFSQDKLWYLDQMFKVLSLAGNYVKDDVWHALIVLISNASELQGYSVRSLYKALLACGEQESLVRVAVWCIGEYGEMLVNNVGMLDIEEPITVTESDAVDAVEVSLKRYSADVTTRAMCLVSLLKLSSRFPPTSESSLLERMPVIDEASYLAKRAASTQATISSDKLAAAATPGSSLKLPNGVAKPPPAPLADLLDLSSDDAPATTSAPTTAPNDFLQDLLGIGLTDTSTAGFDLTFLFIQYIFGLTSEASDAHILTFDTHLCGAPSASTDILMDLLSIGSSPVQNGPPTVSNFSLPGQDENTAYPPITAFQSAALKITFNFKKQSGKPQETTIHASFTNLTSNTFTDFIFQAAVPKFIQLRLDPASSNTLPASGNDSVTQSLSVTNNQHGQKPLAMRIRITYKVNDKLIMNRRRCSTKYDLVKHSSLLAIEAINPPLYRSERALVHEYLACVYRFRPFRNAPVQAIRRDVAEI

SEQ ID NO: 53 - DNA, 394 bp, Oryza sativa
  CDS (1)..(393)
ggtgtggagacggttgtgacggacacggcggggaacaaggtggtggtcaccggcgcggcggacgcggcggagctgaaggagcgcatcgaggcgcggaccaagaaggccgtgcagatcgtctccgccggcgccggcccgccgcccaagaaggataaggaggagaagaaggacaaggacaagaagggcggcggcgacgacaagaaggccgagaaggagaagggcggcggcggcggcgataagaaggcggagaaggagaagggcggcggcgacaagcccaaggaggagaagaaagccaaggagcccaaagaggagacggtgacgctcaagatccgcctccactgcgagggatgcatcgaccgcatcaagcgccgcatctgcaagatcaaagggggca

SEQ ID NO: 54 - protein, 131 aa, Oryza sativa
GVETVVTDTAGNKVVVTGAADAAELKERIEARTKKAVQIVSAGAGPPPKKDKEEKKDKDKKGGGDDKKAEKEKGGGGGDKKAEKEKGGGDKPKEEKKAKEPKEETVTLKIRLHCEGCIDRIKRRICKIKGG

SEQ ID NO: 55 - DNA, 194 bp, Oryza sativa
  CDS (1)..(192)
ggcgaccaggggaggacgtacctgttcagggtgtccaatgtcggggtgaagacgtccgtcaatgtcaggatccaggggcactcgctgaggttggtggaggtggaggggacgcacccggtgcagaacgtgtacgactcgctcgacgtccatgtcggccagtcggtggcgttcctcgtcacgctcgacaaggcggc

SEQ ID NO: 56 - protein, 64 aa, Oryza sativa
GDQGRTYLFRVSNVGVKTSVNVRIQGHSLRLVEVEGTHPVQNVYDSLDVHVGQSVAFLVTLDKA

SEQ ID NO: 57 - DNA, 2815 bp, Oryza sativa
  CDS (1)..(2814)
atggccgccctcttcctcctcctcctcctccacgtatcagacgccgccatcaacccgggcgacctgtccgtgctccacgacctgcgccgctcgctgaccaamgccgaagccgtcctcggctggggcgaccccaacgccgccgacccgtgcgccgcatggccgcacatctcctgcgaccgcgccggccgcgtcaacaacatcgacctcaagaacgccggcctcgccgggacgctccccttcacctttgccgcgctcgacgcgctccaggacctcagcctccagaaccacaacctctccggcgacctcccgtccttccgcggcatggcctccctccgccacgccttcctcaacaacaactccttccgctccatccccgccgacttcttcagcggcctcacctccctcctcgtcatctccctcgaccagaacccgctcaacgtctcctccggggggtggacgatccccgccgacgtcgccgccgcgcagcagctgcagagcctcagcctcaacggatgcaacctcaccggcgccatcccggacttcctcggcgccatgaacagcctccaggagctcaagctcgcctacaacgccctctccggacccatcccctccaccttcaacgcctccgggttgcagacgctctggctcaacaaccagcacggcgtccccaagctctccggcacgctcgacctcatcgccaccatgcccaacctcgaacaggcatggctccacggcaacgacttctccggccccatcccggactccatcgccgactgcaagcgcctctccgacctctgcctcaacagcaaccagctcgtcggcctcgtcccaccggcgctcgagtccatggccggcctcaagtccgttcagctcgacaacaacaatctcttgggccccgtcccggcgatcaaggcgcccaagtacacctactcacagaacgggttctgcgccgacaagccgggggtcgcctgctcgcctcaggtgatggcattgcttcacttcctcgccgaggtcgattaccccaagaggctggtagctagttggtccgggaacaattcctgcgtggattggctgggaattagctgcgttgcagggaatgtgacgatgctcaatttgccggagtatggactcaatggcacaatcagcgacagtcttgggaatctgagtgaactctcggacatcaacctcatcggaaataaccttactgggcatgtgccggatagcctcacaagcctcaggttgctgcagaagctggacctgtccgggaacgacctgaccgggccgctgcccaccttcagcccgagtgtgaaggtgaatgtgaccggcaatctcaacttcaatgggacggcaccaggatcagcgccatccaaggatactcctgggtcttcgtcgtccagggcgccaaccttgcctggccagggcgtccttccggaaaataagaagaaaagatcagctgttgtgttggccaccaccatcccggttgcagtcagtgtggtggctctggcttcagtgtgtgccgtgctcatcttccgtaagaaaaggggatcagttccaccaaatgcagcttccgtcgtcgtccacccccgcgagaattctgacccagacaacttggtcaagattgtcatggtgaacaatgatggcaacagtagttcgacccaaggcaatacacttagcgggagcagcagccgcgctagtgatgttcacatgatcgatacgggcaatttcgtgattgctgtgcaggtcctccgtggcgcaaccaagaactttacccaggacaatgtgcttggccgtgggggctttggtgtcgtctacaagggtgagctgcatgacggcacgatgattgctgtgaagaggatggaggctgcagtgatcagcaacaaggccttggatgagttccaagccgagattaccattctaaccaaggtacggcaccgcaacctggtctcgatactgggttactcaattgaagggaatgagaggctgctggtctatgagtacatgtccaacggggctttgagcaagcatctgttccagtggaagcagtttgaattagaacccctctcatggaagaagaggctcaatattgcactggatgttgctcgtgggatggaatatctgcacaacctggcacatcagtgctacatccatagggatctcaagtcagcaaacattctcctcggcgacgatttccgagcaaaggtatcagactttgggctagttaaacatgcaccagatggaaacttctctgtggcaaccagactcgctggaacttttgggtacttggctcctgaatatgctgtgactgggaaaatcacgacaaaagcagatgtcttcagctttggggtagtgctgatggagctgataactggaatgactgccattgatgagagccgtctggaggaggaaacccgttatctggcctcatggttctgtcagataaggaaggatgaagataggctcagagcagccattgatcctactctggatcaatctgatgagacttttgagagcatctccgtgatcgcagagcttgctggccactgcacatcccgggaacccacccagcgaccggacatgggccacgccgtgaacgtgctcgtcccgatggtagagaaatggaagcctgtgaacgacgagaccgaggactacatgggcattgatctgcaccagccgttgctccagatggtgaagggctggcaggacgcagaggccagcatgacagatggaagcatcctgagccttgaggacagcaagggcagcatcccagctcggcctgccgggtttgcagaatcgttcacctcggctgatggccggt

SEQ ID NO: 58 - protein, 938 aa, Oryza sativa
  misc_feature (34)..(34): The 'Xaa' at location 34 stands for Lys, or Asn.
MAALFLLLLLHVSDAAINPGDLSVLHDLRRSLTXAEAVLGWGDPNAADPCAAWPHISCDRAGRVNNIDLKNAGLAGTLPFTFAALDALQDLSLQNHNLSGDLPSFRGMASLRHAFLNNNSFRSIPADFFSGLTSLLVISLDQNPLNVSSGGWTIPADVAAAQQLQSLSLNGCNLTGAIPDFLGAMNSLQELKLAYNALSGPIPSTFNASGLQTLWLNNQHGVPKLSGTLDLIATMPNLEQAWLHGNDFSGPIPDSIADCKRLSDLCLNSNQLVGLVPPALESMAGLKSVQLDNNNLLGPVPAIKAPKYTYSQNGFCADKPGVACSPQVMALLHFLAEVDYPKRLVASWSGNNSCVDWLGISCVAGNVTMLNLPEYGLNGTISDSLGNLSELSDINLIGNNLTGHVPDSLTSLRLLQKLDLSGNDLTGPLPTFSPSVKVNVTGNLNFNGTAPGSAPSKDTPGSSSSRAPTLPGQGVLPENKKKRSAVVLATTIPVAVSVVALASVCAVLIFRKKRGSVPPNAASVVVHPRENSDPDNLVKIVMVNNDGNSSSTQGNTLSGSSSRASDVHMIDTGNFVIAVQVLRGATKNFTQDNVLGRGGFGVVYKGELHDGTMIAVKRMEAAVISNKALDEFQAEITILTKVRHRNLVSILGYSIEGNERLLVYEYMSNGALSKHLFQWKQFELEPLSWKKRLNIALDVARGMEYLHNLAHQCYIHRDLKSANILLGDDFRAKVSDFGLVKHAPDGNFSVATRLAGTFGYLAPEYAVTGKITTKADVFSFGVVLMELITGMTAIDESRLEEETRYLASWFCQIRKDEDRLRAAIDPTLDQSDETFESISVIAELAGHCTSREPTQRPDMGHAVNVLVPMVEKWKPVNDETEDYMGIDLHQPLLQMVKGWQDAEASMTDGSILSLEDSKGSIPARPAGFAESFTSADGR

SEQ ID NO: 59 - DNA, 2844 bp, Oryza sativa
  CDS (1)..(2844)
atgccgtcggtttcgagggccgtgtgcgtgcagagggcgagcgggaataacggcaggaggtgcagagatggggcggccgccgccggccgccgatccgtcgtggcgcagagagcgcggcacggcaagccggaggtcgccatccgctcggggtccggcggctcggcgcggggcgggcattgctcgcctctcagggcagtggcggcgccgatcccgactaccaaaaagagggtgttccacttcggcaagggcaagagcgagggcaacaaggccatgaaggacctgctgggagggaagggggcgaacttggcggagatggcgagcatcgggctgtcggtgccgccggggttcacggtgtcgacggaggcgtgccagcagtaccaggcggcggggaagacgctgccggcggggctgtgggaggagatcgtcgaggggctccagtgggtggaggagtacatggcggcgcgcctcggcgaccccgcccgccctctcctcctctccgtccgctccggcgccgccgtgtcgatgccggggatgatggacacggtgctgaacctggggctgaacgacgaggtggcggcgggactggcggccaagagcggcgaccgcttcgcgtacgactcctaccgccgtttcctcgacatgttcggcaacgtggtcatggacattcctcatgcactgttcgaggagaagctcgaagccatgaaagcagtcaaggggctgcacaacgacactgacctgactgccactgacctcaaagaactagtggcacagtacaaggatgtctatgttgaagctaagggagagccattcccctctgatcccaagaagcaactgcagctggccgtgttggccgtgttcaactcatgggatagcccaagagcaatcaagtacagaagcataaacaagatcactgggctgaagggcactgctgtaaacgtgcagaccatggtgtttggaaacatggggaacacctctggcacgggtgtgctcttcactaggaacccaagcactggagagaagaagctttacggcgaattccttgtgaatgctcagggtgaagatgtggttgctggaatcagaactccagaggatcttgatgctatgagggaccacatgccggagccttatgaagagctcgttgagaactgcaaaattttggagagtcactataaagaaatgatggatattgaatttactgttcaggaaaataggctttggatgcttcagtgcagaacaggaaagcgcacaggaaaaggtgctgtaaagattgctctagacatggttaacgagggccttgttgagcgccgcacagcacttaagatggtagaaccaggtcacctggatcagcttcttcatcctcagtttgagaacccatcagggtataaagacaaagttattgccacgggcttacctgcatcacctggggctgctgtgggccaaattgtattcactgccgaggatgctgaagcatggcatgcccaagggaaagatgttattctggtgaggacagagaccagcccagaggatgttggtggcatgcatgcagctgttggaattcttacagcaagaggtggtatgacctctcacgctgctgttgttgcgcgcggatggggcaaatgttgtgtgtcaggatgctcaagcgtccgtgtaaatgatgcgtccaagattgtagtgattgaagacaaggcgctgcatgaaggtgagtggctatcgttgaatggatcaactggtgaagtgatcattggcaagcagccactctgcccaccagcccttagtggtgatttggaaactttcatgtcttgggtggatgaagttaggaaactcaaggttatggcaaatgctgatacccccgaggatgcaacaacagccagacagaatggggcagaaggaattgggctatgccggactgaacatatgttcttcgcttcagacgagaggattaaggctgtcaggcagatgattatggcttcaagtcttgaactgaggcagaaagcactagatcgccttttgccttatcagaggtctgactttgaaggcatcttccgtgcaatggatgggcttccggtaactattagactcttggatcctccacttcatgagttccttccagaaggccatgttgaggatatggtgcgtgagctatgctctgaaactggagcagctcaggatgatgtccttgcaagagtagaaaaactttccgaagtaaatccaatgcttggtttccgtgggtgcaggcttggtatatcataccctgaattgactgaaatgcaagcccgtgccatctttgaagctgctataaccatgaccaaccagggtattcaagtctttccggagataatggttccccttgttggaactcctcaggaattggggcatcaagtggatgttatccgtcaaattgccaacaaggtgttcacagacatgggaaaaactattggctacaaagttggaactatgattgaaattcccagggcagctttagtggctgatgagatagcagagcaggctgagttcttctcctttggaacaaacgacctaacacagatgacatttggttacagtagggatgatgtggggaagttccttcccatctatctgtctcagggtatcctccagcatgacccctttgaggtgcttgatcagaggggagttggggagctggttaagctggctacagagagaggccgcaaagctaggcctaacttgaaggtgggcatctgtggtgaacatggtggagagcctctgtcagtcgctttctttgcgaaggctgggctggactatgtttcttgttcgcctttcagggtcccaattgctaggctagctgcagctcaggtgctcctctga

SEQ ID NO: 60 - protein, 947 aa, Oryza sativa
MPSVSRAVCVQRASGNNGRRCRDGAAAAGRRSVVAQRARHGKPEVAIRSGSGGSARGGHCSPLRAVAAPIPTTKKRVFHFGKGKSEGNKAMKDLLGGKGANLAEMASIGLSVPPGFTVSTEACQQYQAAGKTLPAGLWEEIVEGLQWVEEYMAARLGDPARPLLLSVRSGAAVSMPGMMDTVLNLGLNDEVAAGLAAKSGDRFAYDSYRRFLDMFGNVVMDIPHALFEEKLEAMKAVKGLHNDTDLTATDLKELVAQYKDVYVEAKGEPFPSDPKKQLQLAVLAVFNSWDSPRAIKYRSINKITGLKGTAVNVQTMVFGNMGNTSGTGVLFTRNPSTGEKKLYGEFLVNAQGEDVVAGIRTPEDLDAMRDHMPEPYEELVENCKILESHYKEMMDIEFTVQENRLWMLQCRTGKRTGKGAVKIALDMVNEGLVERRTALKMVEPGHLDQLLHPQFENPSGYKDKVIATGLPASPGAAVGQIVFTAEDAEAWHAQGKDVILVRTETSPEDVGGMHAAVGILTARGGMTSHAAVVARGWGKCCVSGCSSVRVNDASKIVVIEDKALHEGEWLSLNGSTGEVIIGKQPLCPPALSGDLETFMSWVDEVRKLKVMANADTPEDATTARQNGAEGIGLCRTEHMFFASDERIKAVRQMIMASSLELRQKALDRLLPYQRSDFEGIFRAMDGLPVTIRLLDPPLHEFLPEGHVEDMVRELCSETGAAQDDVLARVEKLSEVNPMLGFRGCRLGISYPELTEMQARAIFEAAITMTNQGIQVFPEIMVPLVGTPQELGHQVDVIRQIANKVFTDMGKTIGYKVGTMIEIPRAALVADEIAEQAEFFSFGTNDLTQMTFGYSRDDVGKFLPIYLSQGILQHDPFEVLDQRGVGELVKLATERGRKARPNLKVGICGEHGGEPLSVAFFAKAGLDYVSCSPFRVPIARLAAAQVLL

SEQ ID NO: 61 - DNA, 1339 bp, Oryza sativa
  CDS (1)..(1338)
ggcgaagaagatgagcacccccatgaaggccgtgccggcgtcgagcgccgccgacagcacgtagttgtacttctgccaccaccccttgcggtacttgaacacgaagtagttgaagatggtgcccgtgacgagccagctcgcgatgttggtcggcgtcgccggcggcatcccggcgaacccgtaggagatgacggggacgttgatgagcgcgatccacttcttctccgggaacgccctgctgagcagccacaccggcacgggcagcacggcgccggcgaggaacagccacaccaggttgcggtacaggccgtggcggccgaacagccgggcggggccgatgagcccccagatcaccgacgcgtcgaacgtgacccggtacttggggcacgtccacgggctgtccgggtgcagcgcctccacgtcgcagatgttgtcgatgctgcccagcatccaccacgccaccgccaggttcaccacgccggcgaccaccgtgcccaccagctgcgccgtgtacatgcaccgcggcgggatcttcatgtagtgccccagcttgaggtccgcgaggaacgacagcgcgtgcaccgtgctgatcctcccgtagatcttgaacagcaggttcgcgatcggcttccccggcagcgcgtacccgatcatgaactgcgcgatgatgtcgtaccccggttgctggttggtggtggcctggatgacgccgatggggagggtgacgacgaaggcgagggcgaaggcgaagagcatcccccaccacggcagctgcacctcctccctgtacacgaacgacatgaccagcgacacggcgacgctgccgacgagcagcacgaggaaccaccactgcggcacctgcttgtaccgccgcatcagcttcgcgtgcacgtccatcttcgccgccgcggagctcatcgccgacctgctctgcctccagatgtccccgccgtggaacagcgccacgtgcacgatcgtcgccgtgaacctcaggaacccggacccgatggagatggcgaacagcgggctcaggtacagcttcccgtagctctcgtacgccgccacgttgaggtcgaactccctcgtgagcaccttggtggtgtcgtacttctgcccggacgccgtgaacagctggttggagaagattgggaacttcctcgcgtcgaacgtgtcgaacttccagtagcagagcggcacgatgaggtagatgaacatgacgaagcccgcggcggtgttggcgatggacgaccacggcgccaccagcgggctcccgtggtacgccgagatgccggcccagtccagtgtgaaggcgccgacgccgaggccgtggtagccggag

SEQ ID NO: 62 - protein, 446 aa, Oryza sativa
GEEDEHPHEGRAGVERRRQHVVVLLPPPLAVLEHEVVEDGARDEPARDVGRRRRRHPGEPVGDDGDVDERDPLLLRERPAEQPHRHGQHGAGEEQPHQVAVQAVAAEQPGGADEPPDHRRVERDPVLGARPRAVRVQRLHVADVVDAAQHPPRHRQVHHAGDHRAHQLRRVHAPRRDLHVVPQLEVREERQRVHRADPPVDLEQQVRDRLPRQRVPDHELRDDVVPRLLVGGGLDDADGEGDDEGEGEGEEHPPPRQLHLLPVHERHDQRHGDAADEQHEEPPLRHLLVPPHQLRVHVHLRRRGAHRRPALPPDVPAVEQRHVHDRRREPQEPGPDGDGEQRAQVQLPVALVRRHVEVELPREHLGGVVLLPGRREQLVGEDWELPRVERVELPVAERHDEVDEHDEARGGVGDGRPRRHQRAPVVRRDAGPVQCEGADAEAVVAG

SEQ ID NO: 63 - DNA, 4131 bp, Oryza sativa
  CDS (1)..(4131)
atggggtcgctcaccagggcggaggaggaggagacggcggcggccgaggagtggtcgggcgaggcggtcgtctacgtcaacggcgtccgccgcgtgctccccgacggcctcgctcacctcaccctgctccaatacctcagagacattggtcttcctggaacaaagcttggatgtggtgaaggtggctgtggagcctgcactgtgatggtctcatgctatgatcaaactacaaagaagacacagcattttgcaatcaacgcatgcttggctccgctttattctgtggaaggaatgcacataatcacagtagagggaattgggaatcgtcagcgaggtttgcacccaatccaggaacgtttagccatggcccacggttcacaatgtggattttgcacccctggttttgtgatgtcgatgtatgcattgctgagatcaagtgaacagcctcctactgaagagcagattgaagatagccttgcaggaaatttatgtcgctgtactggctacagaccaataatagacgccttccgtgttttctcgaaaagagatgatcttttgtacaacaattcatctctgaaaaatgcagatggccgacctatctgcccttcaacaggaaaaccatgttcctgcggagatcagaaagacatcaatggtagtgaatcttcattattgacacctacgaaaagctactcaccttgttcatacaatgagattgatggaaatgcgtacagtgagaaagaactcattttccccccagaacttcagttgagaaaagttacgtcacttaaattgaatgggtttaatgggattcggtggtatagacctcttaaactaaagcaagtattgcatttgaaagcatgctacccaaatgcaaaactaatcattggtaactctgaagtaggagttgaaacaaagttcaagaatgcccagtataaggtcttgatctcagttactcatgttccagagcttcatacccttaaagtgaaagaggatggtatacatattggttcttctgtaagacttgcacagctccaaaatttcctcagaaaggttattttagagcgtgattcacatgaaatttcatcctgtgaggcaatactgcggcaattaaaatggtttgctgggacacaaatcaggaatgttgcttctgttggaggtaacatttgtactgctagtccaatatcagatctaaatccactttggatggctacaggtgcaacgtttgagataattgatgtgaacaataatattaggaccattcctgcaaaagatttttttctgggttatcgtaaagttgacttaaaacctgatgagatattgctctctgttatactgccatggacaaggccatttgaatttgtcaaagaattcaagcaggcacatagaagggaggatgacattgcgttggtgaatgctggaatgcgtgtctatataagaaaagttgaaggtgattggataatttcggatgtttcaattatctatggaggggtagctgcagtttcacaccgtgcttcaaaaactgaaacctttctcactggaaaaaaatgggactatggattgttggataagacttttgatctgttgaaagaagacgtagttctggctgaaaatgcacctggtggaatggttgaatttcgcagttcacttactttgagtttctttttcaaatttttccttcatgttactcatgaaatgaatataaaaggattttggaaggatggattacatgcaaccaatctttcagccatacagtctttcactagacctgtcggtgttggaactcaatgttatgaattggttagacaaggaactgcagttggccaacctgtggttcacacatcagctatgcttcaggttactggtgaagcggaatatactgatgacacaccgacaccccccaataccttgcatgctgctctggtgctgagtacgaaagctcacgcacgcatattatctattgatgcttcacttgccaaatcttcccctgggtttgcgggtctcttcctttcaaaagacgtgcctggcgctaaccatactgggcctgttatccatgacgaggaggtttttgcatctgatgttgttacatgtgttggccagattgttggacttgttgtggcagatacccgtgataatgcaaaagctgctgcaaataaagtcaatattgagtattctgaacttccagcaattttatccatagaggaagctgtgaaagctggtagctttcatccaaatagcaagagatgcctagtaaaaggtaatgttgaacaatgttttctgtcgggtgcatgcgatagaattatagaaggaaaagtacaagttggaggtcaagagcacttctacatggagcctcagagcactcttgtatggccagttgattctggaaatgaaattcatatgatttcatctacccaggctccccagaagcaccaaaagtatgttgctaatgttcttggtcttccacaatcaagagttgtttgcaagactaagcgtattggtggtggatttggtggaaaagaaaccagatcagcaatatttgctgcagcagcatctgtagctgcttattgtttaaggcagcctgtaaagcttgttttggacagggatattgacatgatgacaactggacagaggcacagtttcctagggaagtacaaggtgggatttaccgatgatgggaagatattggccttagaccttgatgtttataacaatggtggtcattcacatgatttgtcccttccagtcctggagcgtgctatgtttcattcagacaatgtctatgatataccaaatgtcagagtcaatgggcaagtatgtttcacaaatttcccaagcaatactgctttcagaggttttggtggtccacaagctatgctgattgcagagaattggattcagcacatggctacagaactcaagcgaagtcctgaggagataaaagaacttaattttcaaagtgagggatctgtgcttcattatggccagttgcttcaaaattgtacaatacattcagtatgggatgaactaaaggtttcttgtaattttatggaagctcgcaaagctgtaattgattttaacaataataaccgttggagaaagcgtggcattgctatggttcccaccaagtttgggatatccttcactacaaaattcatgaatcaggttctgaggatgaacaattgcaggctgtgcttagtgcaagtttacactgatggaactgtccttgtaacgcatggtggggttgaaatggggcagggtttacacacaaaggtagcccaagttgcggcttcatcattcaatatccctcttagctctatatttatctcagaaacaagcactgataaggtaccaaatgcaacaccaacagcagcctctgctagttcagatttatatggtgctgcagttttggatgcttgtcagcaaattatggctcggatggaacctgttgcttcaagaggaaaccacaagtcctttgctgagttggttctagcatgctacctggaaaggatagatctctctgctcatggattttatatcactcctgatgttgggtttgactgggtgtctggcaagggaactccattctactatttcacatacggagcagcatttgcagaagttgaaattgataccctaactggggatttccacacaaggacagtagatattgttatggatcttggctgttcaattaatccggctattgatattggccagattgaaggaggttttatccaaggattaggttgggcggccctggaagaactaaaatggggggatgataaccacaagtggattcgacctggacatcttttcacttgtgggcctggctcttacaaaataccctctgtaaatgatatacctctaaacttcaaggtctcacttttgaagggcgttttgaatccaaaggtcattcactcatccaaggctgtaggagagccaccgtttttcctcggttcagccgtcttgtttgccataaaggatgcgatatctgccgcaagagctgaggagggtcacttcgactggttcccactcgacagcccagcaacaccggaaagaataagaatggcatgcgtggattccatcacaaagaaatttgctagcgtatattaccgtcccaagcttagtgtatag

SEQ ID NO: 64 - protein, 1376 aa, Oryza sativa
MGSLTRAEEEETAAAEEWSGEAVVYVNGVRRVLPDGLAHLTLLQYLRDIGLPGTKLGCGEGGCGACTVMVSCYDQTTKKTQHFAINACLAPLYSVEGMHIITVEGIGNRQRGLHPIQERLAMAHGSQCGFCTPGFVMSMYALLRSSEQPPTEEQIEDSLAGNLCRCTGYRPIIDAFRVFSKRDDLLYNNSSLKNADGRPICPSTGKPCSCGDQKDINGSESSLLTPTKSYSPCSYNEIDGNAYSEKELIFPPELQLRKVTSLKLNGFNGIRWYRPLKLKQVLHLKACYPNAKLIIGNSEVGVETKFKNAQYKVLISVTHVPELHTLKVKEDGIHIGSSVRLAQLQNFLRKVILERDSHEISSCEAILRQLKWFAGTQIRNVASVGGNICTASPISDLNPLWMATGATFEIIDVNNNIRTIPAKDFFLGYRKVDLKPDEILLSVILPWTRPFEFVKEFKQAHRREDDIALVNAGMRVYIRKVEGDWIISDVSIIYGGVAAVSHRASKTETFLTGKKWDYGLLDKTFDLLKEDVVLAENAPGGMVEFRSSLTLSFFFKFFLHVTHEMNIKGFWKDGLHATNLSAIQSFTRPVGVGTQCYELVRQGTAVGQPVVHTSAMLQVTGEAEYTDDTPTPPNTLHAALVLSTKAHARILSIDASLAKSSPGFAGLFLSKDVPGANHTGPVIHDEEVFASDVVTCVGQIVGLVVADTRDNAKAAANKVNIEYSELPAILSIEEAVKAGSFHPNSKRCLVKGNVEQCFLSGACDRIIEGKVQVGGQEHFYMEPQSTLVWPVDSGNEIHMISSTQAPQKHQKYVANVLGLPQSRVVCKTKRIGGGFGGKETRSAIFAAAASVAAYCLRQPVKLVLDRDIDMMTTGQRHSFLGKYKVGFTDDGKILALDLDVYNNGGHSHDLSLPVLERAMFHSDNVYDIPNVRVNGQVCFTNFPSNTAFRGFGGPQAMLIAENWIQHMATELKRSPEEIKELNFQSEGSVLHYGQLLQNCTIHSVWDELKVSCNFMEARKAVIDFNNNNRWRKRGIAMVPTKFGISFTTKFMNQVLRMNNCRLCLVQVYTDGTVLVTHGGVEMGQGLHTKVAQVAASSFNIPLSSIFISETSTDKVPNATPTAASASSDLYGAAVLDACQQIMARMEPVASRGNHKSFAELVLACYLERIDLSAHGFYITPDVGFDWVSGKGTPFYYFTYGAAFAEVEIDTLTGDFHTRTVDIVMDLGCSINPAIDIGQIEGGFIQGLGWAALEELKWGDDNHKWIRPGHLFTCGPGSYKIPSVNDIPLNFKVSLLKGVLNPKVIHSSKAVGEPPFFLGSAVLFAIKDAISAARAEEGHFDWFPLDSPATPERIRMACVDSITKKFASVYYRPKLSV

SEQ ID NO: 65 - DNA, 2529 bp, Oryza sativa
  CDS (1)..(2529)
ggtgctggcctgcaaaatcttgggaacacttgctacctgaactcggtgctgcaatgcttgacgtacacagaaccatttgcggcctatttgcagagcgggaagcacaagtcttcatgtcgtactgctggattttgtgcactatgtgctcttcaaaaccatgttaagactgctctacagtcaactggaaaaatagtgacgccatcacagattgtcaagaacttgcgctgcatctcccgtagtttccgcaattcaaggcaggaggatgcacatgagttaatggttaatttacttgaatccatgcataaatgttgtctaccttctggagtaccaagtgagtctcctagtgcatatgagaagagcttagttcacaaaatatttggtggccgcctaagaagtcaggtgaaatgcacacagtgctcacattgctccaacaaatttgatcctttcttggatctcagccttgatattggtaaggccacgtctctggtgagggcacttcaaaatttcactgcggaagagctcttagatgggggagaaaagcaatatcagtgccaacgctgcaggaaaaaggttgtagcaaagaaaaagtttacaattgataaggcgccatatgttctgacaattcatctgaagcgctttagccctttcaacccccgtgaaaagattgacaaaaaagttgattttcagccaatgctagacttgaagccatttattagcgactctaaagtgagtaatttgaaatacagcctttatggtgttttggttcatgctggttggaacactcagtcaggccattattattgcttcgttcgaacttccagtggaatgtggcacaaccttgatgataaccaggtacgccaagtccgtgaggcagatgtattgagacagaaagcatatatgttattttatgtacgtgacagagttgggaatccgactccacgcaaggataatatcactgctaatatgccagccaggagaacaatacctgaaaagatctcaggtctgagtgatatgatccagagcggcgtaattgaagcaaaattgaacggttcctcgtctccttatggcgataagaggttgcacggcataagcaatgggaactcaatcaagacttcaagagagcattatttgaagaaagatggcaaaactgaagctcctaaagcctctgaaaacaatggcctggcttccacacagaaagcttctgcacctcaaattgatggtgctaccttatctgctcaatctaagcaaattacttcaactggtcacagagaggtatcttcatcagatcgatctgcatctcttacacatgtgattgtgaaccaagcagtggccatggttccgtcgcaggaattgcaaccaaaggttgatggcttaaccgatacctcttccctgggcaatggcaatgcgatattgtctgagcgaaataaacaaacatcccagcatcaaaatccattttctatgccagcttcccatggaaaggacacaggggcagggcttgctgcacaaactttcccaactaaggatgctattgtttcaaatggtgttgtacctagtagcagggatccaatttccagtgagaaggtgtgtggcttgcaaaaatccatcaagcaagatgacaaaacggtgaaagaacttcctataagtgagaacaatatagtatcaggacttgaacgagtcaacgccagaaaacagactagctctgaagtttccatgaaggtagctgcagctgattcgtgcaatagcaacacacctaaaagggtggatttgaagtcaaagaaacttgtgagatatccagtcatgaacatgtggcttgggcccagacaagttatgctaggttcactaaaggtacaaaagaaaaagaaatgcaatagaactagaagacggtctgtagtttgtgaggacatggccaatgccacttgttcaggtaacaacacaagcgagcagcaggcatcaacatcaacaacaacgtcgtctgaaactgtgcaatgtactcccagagggcggaaacgtgcctatgatagtgacagtcctaaaaataataaccagaagcaaaacaagcaagacgttattggagccgatactggtagtggtgaacttaacatggataagagaaatgttattagtgaaaccgctgctagtgctgagcttccgaagctgggtccaggctcttctgcaaatcaggaacattcaaggaacaatgttcatgcaaaattgggagttccccggcattttactgttctgacaagggacttggctgaagttactgttccatgctgggatgatgttgctgtgtcaaatgctgaggcaagagagtcaaaacattcagaaagcaagagcattggatatgtgttagatgaatgggacgaggagtatgaccgtggaaagaccaagaaaatcagaaattcaaaggaagactacggtggaccaaaccccttccaggaggaggccaactacatctcacagagaaacatgaaacagaggacctatcaacccaaatcctggaagaaacatgcccatgttagaagatga

SEQ ID NO: 66 - protein, 842 aa, Oryza sativa
GAGLQNLGNTCYLNSVLQCLTYTEPFAAYLQSGKHKSSCRTAGFCALCALQNHVKTALQSTGKIVTPSQIVKNLRCISRSFRNSRQEDAHELMVNLLESMHKCCLPSGVPSESPSAYEKSLVHKIFGGRLRSQVKCTQCSHCSNKFDPFLDLSLDIGKATSLVRALQNFTAEELLDGGEKQYQCQRCRKKVVAKKKFTIDKAPYVLTIHLKRFSPFNPREKIDKKVDFQPMLDLKPFISDSKVSNLKYSLYGVLVHAGWNTQSGHYYCFVRTSSGMWHNLDDNQVRQVREADVLRQKAYMLFYVRDRVGNPTPRKDNITANMPARRTIPEKISGLSDMIQSGVIEAKLNGSSSPYGDKRLHGISNGNSIKTSREHYLKKDGKTEAPKASENNGLASTQKASAPQIDGATLSAQSKQITSTGHREVSSSDRSASLTHVIVNQAVAMVPSQELQPKVDGLTDTSSLGNGNAILSERNKQTSQHQNPFSMPASHGKDTGAGLAAQTFPTKDAIVSNGVVPSSRDPISSEKVCGLQKSIKQDDKTVKELPISENNIVSGLERVNARKQTSSEVSMKVAAADSCNSNTPKRVDLKSKKLVRYPVMNMWLGPRQVMLGSLKVQKKKKCNRTRRRSVVCEDMANATCSGNNTSEQQASTSTTTSSETVQCTPRGRKRAYDSDSPKNNNQKQNKQDVIGADTGSGELNMDKRNVISETAASAELPKLGPGSSANQEHSRNNVHAKLGVPRHFTVLTRDLAEVTVPCWDDVAVSNAEARESKHSESKSIGYVLDEWDEEYDRGKTKKIRNSKEDYGGPNPFQEEANYISQRNMKQRTYQPKSWKKHAHVRR

SEQ ID NO: 67 - DNA, 492 bp, Oryza sativa
  CDS (1)..(492)
caggacacccgtcctctgcaagcccaacgtcgacgccatggaggaggccctcaggatcgccaacgtgaaccctcacaaggcgattttcttcgacgacagcgtgaggaacatccaggcggggaagaggatcgggctccacacggtgctggtgggcacgccgcagcgggtgaagggcgcggaccacgcgctggagagcatccacaacatcagggaggcgctgccggagctgtgggaggaggccgagaaggcggaggacgtgctcatctactccgaccgcgtcgccatcgagacatcggtgaccgcgtaggccacacctactgtctctcccgactccggcgaatcgctcagaacgagcaaccatccatccatccatgtccatccctggccgggcaggtgatcatcaggtgggaattcagaattggccgggacaacaatacgttccaagaaaaaaagaggagggtgttccgtggaagttcaggattcagaatgtaa

SEQ ID NO: 68 - protein, 163 aa, Oryza sativa
QDTRPLQAQRRRHGGGPQDRQREPSQGDFLRRQREEHPGGEEDRAPHGAGGHAAAGEGRGPRAGEHPQHQGGAAGAVGGGREGGGRAHLLRPRRHRDIGDRVGHTYCLSRLRRIAQNEQPSIHPCPSLAGQVIIRWEFRIGRDNNTFQEKKRRVFRGSSGFRM

SEQ ID NO: 69 - DNA, 753 bp, Oryza sativa
  CDS (1)..(753)
atggtctgcgtcgccatcgagtaccggatgcgccgggggcagcgtgacagggccccggcgtccgccgacgaggaaaggggaagtgacgggtcgtcttcatctagcgatgatgatgtcacggaggacgatcgccgtggtagctgcaccgattgcgtcagtattgcaaagcacctggagtcagctaatacaatgttctccttcatatggtggataattggattttattggatatctgctgggggtgaggatgttatccgtgatgcacctcagctttactggctttgcatagtctttctggcatttgacgtgttctttgttgtattctgtgttgctctggcttgcatcattggtattgctgtatgttgctgcctaccttgcattatagctattctctatgcggtttctgatcaggaaggagcgtcagaagatgatattcgccaaattccaagatacaaatttcggagaacagatgaacctgaaaaacaaactgctgatgagacaggaccttttggtggaataatgacagagtgtggcaccaatcaacctattgagaaagtactcgcacctgaagatgcggagtgttgcatttgcctttcggcatatgatgatggtgcagagctgcgtgaacttccttgtgggcaccatttccactgtgcctgcattgataaatggctgcatatcaacgcaacatgccccctgtgcaagttcaatatccggaaaagtggcagtagcagtggaagtgaagaagtatga

SEQ ID NO: 70 - protein, 250 aa, Oryza sativa
MVCVAIEYRMRRGQRDRAPASADEERGSDGSSSSSDDDVTEDDRRGSCTDCVSIAKHLESANTMFSFIWWIIGFYWISAGGEDVIRDAPQLYWLCIVFLAFDVFFVVFCVALACIIGIAVCCCLPCIIAILYAVSDQEGASEDDIRQIPRYKFRRTDEPEKQTADETGPFGGIMTECGTNQPIEKVLAPEDAECCICLSAYDDGAELRELPCGHHFHCACIDKWLHINATCPLCKFNIRKSGSSSGSEEV

SEQ ID NO: 71 - DNA, 3720 bp, Oryza sativa
  CDS (1)..(3720)
atggacgagtcaggcagaggaacaggtgatgatcatggccgggagacgaaggatgctgcggcggcggcgtcgtcgtcgtcggggaagaaggtgccgctgttcagcttgttccggtacgccgaccgcctcgacgtgctgctgatggttgtcggcacggtgggcgcgctcggcaacggcatctcgcagcccctcatgacggtcctcttcggcaacgtcatcaactccttcggcgcgaacaccagcggcagcgtcctccgcagcgtgaccaaggtgaaggtatcatgctggactatggcaggagaaaggcagtctgcccgcatccgttctttatacctgaaagccgttctgaggcaggatattacattcttcgacacagagatgacaactggtgaagcagtttctagaatgtctagtgataccctcctaattcaaggtgctcttggtgagaagggagggaagcttgtagaactgttatcaagcttcatcggtggctttatcatagcattcactagaggatggcttctcactcttgtcatgctaacatcgctaccgttaattgctattgccagtgcagtttctgcacaggccctaactagagtttctagcaagagacaaacatcatatagtgatgctggggacacagttgaacagaccattggatctataagaacagttgtgtccttcaatggtgagaagaaagcgatagcaatgtaccgtaattttataaagaagtcatacaaggctactattgaggaaggcattatcactggttttggcatgggctctgtcatgtgcgtcgtatttggcagctatggattagccttctggtatggtggaaagctaatcattgagaaaggttacacaggaggaaaaatcatgactatcttgtttgccgtgttgaccggcaatgcaacacctgcagttgctgcagttgtggaaggtcaatctgcagcatacaatttgttcaaaacaattgagaggaaaccagagatagattccgatgataacaatggcatggttttagaagatatgaatggcgatattgagctaaaggatgtgtactttcgttaccctgcaagaccagagcagttgatattggatggattgtcgttacaagtagcgagtggaacaacaatggctatagtcggagagagtggaagcggaaagtcaactgttatcagcctagtcgaaagattctacgatccacagtctggcgaagttttaatagatggaattagcatcaagaaactgagacttgattggataagagggaagatcggtcttgttagccaagagcctctgctttttatggcctccattaaagataacataatatatggtaaaaaagatgcaacgcttgaagagatcaagagagcagcggagcttgcaaatgcagctaacttcattgacaagttaccaaatggttatgatactttagttggccagcgcggtactcagctctctggaggacaaaaacagagaattgcaattgcaagagccatcctcaaagatccaaaaatccttttgctcgatgaagcaacaagtgcacttgatgtggagtctgagaggatagttcaggaggcactaaatagaatgatggtagaaagaaccacactcgttgtcgctcatcgtttgagcactgtgaggaatgttgattgcatcacagtcgtccgcaaaggaaaaatagttgaacaaggtcctcatgatgcactggtgaaggatcccgatggagcttactcccagctaattaggctacaagagactcatcgtgatgaaaggcataaactaccagattccagatcaaaaagtactagtttgtcattcagacgatcaagaactaaagattttctcagcaagagcaacaggtattccttcaagagccccttaggattgcctgttgatatacatgaggatggaatgacaagcgaacaacaaaaggttgaccactctgacagtaaggccattaaaaaaacaccatttggacggctttttaatcttaataagccagaagtgccagttcttttgttaggttctatagcagcatcagtgcatggagtcattttgccactatacggtataataatgccaggtgttctaaaatcattctatgaaccgccagatcagctgcgaaaagattctagattttgggcattgatgtctgttgttctgggggttgcttgtttgatttcaatcccagcagaatattttttgtttggaattgctgggggaaagcttatacagcgtgtccgtacactgtcatttcaaagaattatgcaccaagaggttgcttggtttgataagccctccaattccagtggggcacttggtacaaggctctcagtcgatgcgttgaatgtccgccgtttagtaggagataacctggcccttatagtccaggctgtagctacactaatcactggctttgccatagcttttgcggcagattggaggcttgcactgatcatcacttgtgtaattcctttagtgggtgcacagggctatgctcaagttaagttcttgaaggggttcagtgaagaatctaaggagatgtatgaggatgcaaaccaagttgcggctgacgctgtaggcagcatcagaactgtagcatctttctgttcagagaaaagagtggtggcaatatacaacaagaaatgtgaagctttaagaaaacagggaattcgaagcggaatcgttggagggattggcttaagtttctcaaacttgatgttatatctgacttacggtctttgcttctatgttggtgcaaagttcgtaagtcagggaaaaactactttttcagatgttttcaaagttttctttgctttagttttggcagccgttggtgtttcgcagtcaagtgcattgtcwactaatgcaacaarggcaagggattctgccatttccatttttagtattatcgatcggaagtctaggattgattcaagtagcgacgagggagcgataatggaaaacgtcactggcagcattgatttcaataatgtcagtttcaagtacccatcacgccctgatgttcaaatattcagtgactttaccttgcacattccttcccaaaagaccatagcacttgttggagaaagcggtagtgggaagtccacgataattgctttattagagcgtttctatgatcctgattctggtaatatctcactagatggagttgaaattagaagcttaaaagtcagctggttgagggatcagatggggcttgtaggccaggagccagtgcttttcaacgamacaatccgtgccaacataacatacgggaaacacagtgaggtaacagaggaagagatcactgctgtggccaaggcagcaaacgcccatgagttcgtatcaagcctgccacaaggatacgacacagtggtaggtgagaaaggggtgcaactatctggtgggcaaaaacagagggtagcaattgcaagggccatcctaaaggaccctaagatactgctacttgatgaggcaaccagtgctctagatgcagaatcagaacgtgttgttcaagatgcattggatcgagtcatggtcaacaggactaccattgtagtggcacaccgcctctccacaatcaaaggggctgatatgattgcagtcctcaaggaaggaaaaattgcagaaaaaggaaagcatgaagcactattgcggatcaaggatggtgcatatgcttcacttgtacaactccgctctaattccgagtaa

SEQ ID NO: 72 - protein, 1239 aa, Oryza sativa
  misc_feature (956)..(956): The 'Xaa' at location 956 stands for Ser.
  misc_feature (961)..(961): The 'Xaa' at location 961 stands for Arg, or Lys.
  misc_feature (1086)..(1086): The 'Xaa' at location 1086 stands for Glu, or Asp.
MDESGRGTGDDHGRETKDAAAAASSSSGKKVPLFSLFRYADRLDVLLMVVGTVGALGNGISQPLMTVLFGNVINSFGANTSGSVLRSVTKVKVSCWTMAGERQSARIRSLYLKAVLRQDITFFDTEMTTGEAVSRMSSDTLLIQGALGEKGGKLVELLSSFIGGFIIAFTRGWLLTLVMLTSLPLIAIASAVSAQALTRVSSKRQTSYSDAGDTVEQTIGSIRTVVSFNGEKKAIAMYRNFIKKSYKATIEEGIITGFGMGSVMCVVFGSYGLAFWYGGKLIIEKGYTGGKIMTILFAVLTGNATPAVAAVVEGQSAAYNLFKTIERKPEIDSDDNNGMVLEDMNGDIELKDVYFRYPARPEQLILDGLSLQVASGTTMAIVGESGSGKSTVISLVERFYDPQSGEVLIDGISIKKLRLDWIRGKIGLVSQEPLLFMASIKDNIIYGKKDATLEEIKRAAELANAANFIDKLPNGYDTLVGQRGTQLSGGQKQRIAIARAILKDPKILLLDEATSALDVESERIVQEALNRMMVERTTLVVAHRLSTVRNVDCITVVRKGKIVEQGPHDALVKDPDGAYSQLIRLQETHRDERHKLPDSRSKSTSLSFRRSRTKDFLSKSNRYSFKSPLGLPVDIHEDGMTSEQQKVDHSDSKAIKKTPFGRLFNLNKPEVPVLLLGSIAASVHGVILPLYGIIMPGVLKSFYEPPDQLRKDSRFWALMSVVLGVACLISIPAEYFLFGIAGGKLIQRVRTLSFQRIMHQEVAWFDKPSNSSGALGTRLSVDALNVRRLVGDNLALIVQAVATLITGFAIAFAADWRLALIITCVIPLVGAQGYAQVKFLKGFSEESKEMYEDANQVAADAVGSIRTVASFCSEKRVVAIYNKKCEALRKQGIRSGIVGGIGLSFSNLMLYLTYGLCFYVGAKFVSQGKTTFSDVFKVFFALVLAAVGVSQSSALXTNATXARDSAISIFSIIDRKSRIDSSSDEGAIMENVTGSIDFNNVSFKYPSRPDVQIFSDFTLHIPSQKTIALVGESGSGKSTIIALLERFYDPDSGNISLDGVEIRSLKVSWLRDQMGLVGQEPVLFNXTIRANITYGKHSEVTEEEITAVAKAANAHEFVSSLPQGYDTVVGEKGVQLSGGQKQRVAIARAILKDPKILLLDEATSALDAESERVVQDALDRVMVNRTTIVVAHRLSTIKGADMIAVLKEGKIAEKGKHEALLRIKDGAYASLVQLRSNSE

SEQ ID NO: 73 - DNA, 2625 bp, Oryza sativa
  CDS (1)..(2625)
atggcggcggcggagcagagcgcggagcagttcaggggccaggcgaggctcccggggttcgcggcgccccggcggtacgacctgcggctcgtccccgacctcgacgggtgcgccttcacgggatctgtggacgtctccgtcgacgtcacggcgcccaccaggttcctcgtgctcaacgccgccgagctcgaggtctcccccgggggcgtccagttcaagccccatggcgccgagcaggagctgcacccagcggaggttaccaatgtgccagaggatgagatcctgattatccgcttcaatgaggttcttcctgtaggggagggaactttagtaattgcattcaagggaactctgaacgacaagatgcatggcttctacagaagtgtgtatgaactcaatggggagaagaagaacatggcggtaacccagtttgaacctgctgacgcaaggcgttgttttccttgttgggatgagccctcttttaaggctatattcaaaattactctagaagttccgtctgagaccgttgcattgtcaaacatgccagtggttgaagagaaggtcaatggccttatcaaagctgtctattttcaagaaacaccaataatgtcaacatacctagtggctgttattgttggcatgttcgactatgtggaagctttcaccactgatggcactagggttcgtgtttacactcaagttggcaagagtgcccagggaaagtttgcactagaggttgctgtgaagacactggtcctcttcaaggagtattttgctgtgccatacccactcccaaaaatggacatgattgccattcctgattttgcctctggagcaatggagaactatggcttggttacatatcgtgaaacagctttgttatttgatgagaaacactctgcagctgcgaataagcaaagggttgcagttgtggtagcccatgaattagctcaccagtggtttggaaatcttgtgacgatggagtggtggacacacctatggcttaacgagggttttgcgacatgggtctcctacttagctgcagacaatttctttcctgaatggaatgtttggacccaatttcttgaggaatctacaacaggtttcaagttagatgcccttgcagggtcacatccaattgaggtcgacgtaaatcacgttgatgaaatagatgaaatatttgatgctataagctacaggaaaggagctgctgttattcggatgctgcaaagctatcttggggctgaaacttttcagaaatctctggccgcatacatcgaaaagttcgcatattcaaatgccaagactgaggacttgtgggctgcccttgaagaggggtctggtgaaccagtgaaaacattaatgcattcatggacaaagcagcaagggtaccctgttgttaatgtgaagctcaaggatggaaagctagagatggagcagacacagttcctatcaagcggggctgaaggagttgggcaatgggtggttcccatcacactgtgttgctgttcgtactcacgtcaagagaagttcctttttaatggaaagcaagaggattttaatttgtcagggcttgtagaatgtcaaaagaaagaagacttctggattaaacttaatgtcaatcagactggcttctatagagtgagctatgatgaggaacttgcatctcgacttagatatgcaattgaagccaacaaactgagtgcagcagacagatatggtgtacttgatgacacatatgccctctgtatggctggcaaacagaagctagtctccttattgcatttgattgctgcgtacaaggatgaaaccgagtatactgtgctcgccacaagtctgagcattgtcgagatggtggctgttgctgctcctgaggggttgggcaagctgaaaaagttcctgattgactttcttgagccatttgcacagagaattggttgggatgctaaaagcggtgagggtcacttggatgcattattgagaggtacacttttaactgctctggcagaacttggccatgaagctacaataaatgaagctgtacgccgatttaacatctttgtggaagatagagaaacaccactactccctccagatgttcgaaaggcggcatatgttgctttgatgcagacagtgaacaaatcaaacagagccggctatgaatcactattgaagatctataaagaaactgatctgagccaggaaaaagtcagaattttaggttctctagcatcttgccctgatcctgatgttgttcgtgatacactggacttcatgctgtcacctgaggtgaggaatcaggactctatatttttgcttagaggagtcggtgcagcgggacatgaggtggcatggacatggttgaaggaaaagtgggactacatttcagacaccttctctggaactcttctcacctatttcgtttccaccaccgtctcaccgctgcgcaccgatgaaatgggcgacgacgcggaggagttcttcaagagcaggacgaaggccaacatcgcgaggacggtgaagcagagcatcgagagagtgaggatcaatgccaaatgggtggagagcaccagggccgaggctaacctgggcaatgtcctcaaggaaatttctcacgaccactga

SEQ ID NO: 74 - protein, 874 aa, Oryza sativa
MAAAEQSAEQFRGQARLPGFAAPRRYDLRLVPDLDGCAFTGSVDVSVDVTAPTRFLVLNAAELEVSPGGVQFKPHGAEQELHPAEVTNVPEDEILIIRFNEVLPVGEGTLVIAFKGTLNDKMHGFYRSVYELNGEKKNMAVTQFEPADARRCFPCWDEPSFKAIFKITLEVPSETVALSNMPVVEEKVNGLIKAVYFQETPIMSTYLVAVIVGMFDYVEAFTTDGTRVRVYTQVGKSAQGKFALEVAVKTLVLFKEYFAVPYPLPKMDMIAIPDFASGAMENYGLVTYRETALLFDEKHSAAANKQRVAVVVAHELAHQWFGNLVTMEWWTHLWLNEGFATWVSYLAADNFFPEWNVWTQFLEESTTGFKLDALAGSHPIEVDVNHVDEIDEIFDAISYRKGAAVIRMLQSYLGAETFQKSLAAYIEKFAYSNAKTEDLWAALEEGSGEPVKTLMHSWTKQQGYPVVNVKLKDGKLEMEQTQFLSSGAEGVGQWVVPITLCCCSYSRQEKFLFNGKQEDFNLSGLVECQKKEDFWIKLNVNQTGFYRVSYDEELASRLRYAIEANKLSAADRYGVLDDTYALCMAGKQKLVSLLHLIAAYKDETEYTVLATSLSIVEMVAVAAPEGLGKLKKFLIDFLEPFAQRIGWDAKSGEGHLDALLRGTLLTALAELGHEATINEAVRRFNIFVEDRETPLLPPDVRKAAYVALMQTVNKSNRAGYESLLKIYKETDLSQEKVRILGSLASCPDPDVVRDTLDFMLSPEVRNQDSIFLLRGVGAAGHEVAWTWLKEKWDYISDTFSGTLLTYFVSTTVSPLRTDEMGDDAEEFFKSRTKANIARTVKQSIERVRINAKWVESTRAEANLGNVLKEISHDH

SEQ ID NO: 75 - DNA, 378 bp, Oryza sativa
  CDS (1)..(378)
acaaactccctggtgcaaatcagaagggcacttcgtgcccttgttgatgatcacacggatgggttgatggattttgaagatactgaagtgagatcttcggaggaaactgatgctttggaggaagctagattggcaatcgagcaagtagtgatcccaaaaggtgaaagcgtgcagctactgcccagaccaccaagcatcatcgcttcccaggtggatctagtcgaaagtttcaagctcaagtgggaatctataggccaggagccaaacgcatgcctcagaattcttccgcaattcgtaggcgtggaagaaggcggcaagtctgtcaagcaagaagctgcaactgagctcacagattcagacaattcagatgacatggac

SEQ ID NO: 76 - protein, 126 aa, Oryza sativa
TNSLVQIRRALRALVDDHTDGLMDFEDTEVRSSEETDALEEARLAIEQVVIPKGESVQLLPRPPSIIASQVDLVESFKLKWESIGQEPNACLRILPQFVGVEEGGKSVKQEAATELTDSDNSDDMD

SEQ ID NO: 77 - DNA, 528 bp, Oryza sativa
  CDS (1)..(528)
ccacgcgtccggacggtggcctcggcgcgcgacctcaagaacgtcaactggcgcaacggcgacctcaagccctacgccgtcgtgtggatcgacgacggcgccaagtgctccacccgcgtcgacctcgacaacgccgacaaccccacctgggatgacaagctcaccgtccctctcccgccctccacccgcctcgacgacgccgtcctctacctcgacgtcgtccacgccaacgccaccgacggcgtcaagcccctcgtcggctccgcgcgcctcccgctccgcgacgtcctcgccgacaccggcataggcgcccgagcctcccgctccctccgcctcaagcgcccctccggccgcccccatggacgcctcgaagtccgcgtcgccgtccgcgagcccaagcgctactacgacccctcgccggcgtaccctgctccctaccaccagcagacgaaccgtgacccctacgcctacggtaacactacaactggtggctatggctatgcctatggcggtacccctttcctataa

SEQ ID NO: 78 - protein, 175 aa, Oryza sativa
PRVRTVASARDLKNVNWRNGDLKPYAVVWIDDGAKCSTRVDLDNADNPTWDDKLTVPLPPSTRLDDAVLYLDVVHANATDGVKPLVGSARLPLRDVLADTGIGARASRSLRLKRPSGRPHGRLEVRVAVREPKRYYDPSPAYPAPYHQQTNRDPYAYGNTTTGGYGYAYGGTPFL

SEQ ID NO: 79 - DNA, 687 bp, Oryza sativa
  CDS (1)..(687)
atggcggaggcggaggcggggaggaaggagaagaaggaggtggtgcggctggagcgcgaatcggtgatccccatcatgaagcccaagctcatcatgaagctcgcctacctcatcgaacaacaatctgacagagaagaattcttgaagctctgcaagaggattgagtacaccattagggcctggtatcatctccagtttgatgatatgatggaactatttgctctttttgaccctgttcatggtgcccaaaaactgcaacagcagaatttctcgactgaggaagtcgatacactcgagcagaacttcctgacctatttctttcaggtgatgcaaaaaagcaatttcaacatattatcagatgatgaggttgagcttgctcattctggacaatatctgctgaatcttcccatcaaagttgatgaagcaaagttagataacaaacttttgtcaaagtattttaaagagcaccatcacgacaacctaccggagttctcagataagtatgtcatattccggaggggcattggactggatcgcactagcaactttttctttatggagaaagtggacatgatcatagctcgtgcgtggcgatggttcttggagaaaacaagactgcaaaagctcttctcaagaaagaaaagtgttaggccaaagacagattccaagaagaatgatgatctagtt

SEQ ID NO: 80 - protein, 229 aa, Oryza sativa
MAEAEAGRKEKKEVVRLERESVIPIMKPKLIMKLAYLIEQQSDREEFLKLCKRIEYTIRAWYHLQFDDMMELFALFDPVHGAQKLQQQNFSTEEVDTLEQNFLTYFFQVMQKSNFNILSDDEVELAHSGQYLLNLPIKVDEAKLDNKLLSKYFKEHHHDNLPEFSDKYVIFRRGIGLDRTSNFFFMEKVDMIIARAWRWFLEKTRLQKLFSRKKSVRPKTDSKKNDDLV

SEQ ID NO: 81 - DNA, 1167 bp, Oryza sativa
  CDS (1)..(1167)
gagagagatatcagtatggttaacagttatcccccatctgcttttgattgcaaaggttggaattcagcatctattttcatttatgaatctgatgaggaaatccagtgccttcttgactggttaagagactatgacccaagggagaaggaactgaaagactctatcttgcagtggcaaagacatttctgtcatcaaagcagttctcctctcgttgatcctccaatttctggtccaaagggtgaacagcttatggagcttccaaataccaaggctgcagtaattttggaacaaaagtatggtctgcaattggaccaggacacaagtgatctaccgaaaaagcgaggaaagaagataaagttaagttctgaagatagaacatatcgctgcgactgtttggaacctgtatggccttctcgataccattgtttaacatgtcatgagacttatctcatatctacagagtttgaggggcataatgatggaaaatgcagtaaaatccaccagtctcctgatgaaagcagagaaaatgatgagccaaaagtgaaggttaccaaatctgatacgaaggaaaaagattcccttgaatgtagctctgtcattgaaccgtccagtgacagaaaattgatgcaatgcccatatgactttgaagaaatttgcagaaagttcgtcacaaatgattcgaacaaggagacagtaaagcagattggacttaatgggtccaatggagttccatcatttgtgccttcacctgcattttttcttgaacctgcaattgtacaaagtcaaaacmgaaaagatgatgaactcaaggattggacctcctctttagaggaatgcaatgcaatgtctgctcaaaagctagttcaagaggtttccaaatctggtcaaagttgtcctggcaatgtgggtgatgagaaggtgcaaaaatctaaaaagcccacccctgataatacttctggtgaggaagcacattctacaacaggcaagccaacacgattgctagctgttaatggggggttggttccagagtcatccttgaggcctcttataggacgaaactctcacatacttaagcagcaaaagataaacttgcttgacatcgaagcagccttgcctgaggaggcactgagagcctcaaagtgtcagcaaataagaaggcgttcatgg

SEQ ID NO: 82 - protein, 389 aa, Oryza sativa
  misc_feature (264)..(264): The 'Xaa' at location 264 stands for Arg.
ERDISMVNSYPPSAFDCKGWNSASIFIYESDEEIQCLLDWLRDYDPREKELKDSILQWQRHFCHQSSSPLVDPPISGPKGEQLMELPNTKAAVILEQKYGLQLDQDTSDLPKKRGKKIKLSSEDRTYRCDCLEPVWPSRYHCLTCHETYLISTEFEGHNDGKCSKIHQSPDESRENDEPKVKVTKSDTKEKDSLECSSVIEPSSDRKLMQCPYDFEEICRKFVTNDSNKETVKQIGLNGSNGVPSFVPSPAFFLEPAIVQSQNXKDDELKDWTSSLEECNAMSAQKLVQEVSKSGQSCPGNVGDEKVQKSKKPTPDNTSGEEAHSTTGKPTRLLAVNGGLVPESSLRPLIGRNSHILKQQKINLLDIEAALPEEALRASKCQQIRRRSW

SEQ ID NO: 83 - DNA, 728 bp, Oryza sativa
  CDS (1)..(726)
gttgaagctcagaagaaaattgaagctgcaattcggcagaaaggtattgatgaaaactgggaggctgccttggagcacaaccctgaagcatttgctcgagtggttatgctgtatgtggacatggaagtcaatggtgtacctttgaaggcctttgttgacagtggagcacaatcaactatcatatcaaaaagctgtgccgaacgttgcgggttgcttaggctgcttgatcagcgatatagaggtgttgctattggcgttggtcaatcagagattcttggtagaatacatgtagccccaataaagattggccatgtcttctatccttgttcattcacagtattggatgctcccaatatggaatttctttttgggcttgatatgctgcggaaacatcagtgcataattgacttaaaagacaatgttcttagagtaggaggtggtgaggtttcagtgcccttcttacaagagaaagacatcccttcacatatacgtgatgaagagaaactatcgaagctagcatctctcagccaaggagctgctggagaatcgtcaacggcacgggagaagactcctgatgcgccaccacgagctcctactacaggtgctccagctgtgaatcctccgcaaccacagggaggaggagatttcgaagcaaaagtcacgaaactggtggaacttggattcgaccgggcatccgtaatccaagctctcaagttgttcaacgggaa

SEQ ID NO: 84 - protein, 242 aa, Oryza sativa
VEAQKKIEAAIRQKGIDENWEAALEHNPEAFARVVMLYVDMEVNGVPLKAFVDSGAQSTIISKSCAERCGLLRLLDQRYRGVAIGVGQSEILGRIHVAPIKIGHVFYPCSFTVLDAPNMEFLFGLDMLRKHQCIIDLKDNVLRVGGGEVSVPFLQEKDIPSHIRDEEKLSKLASLSQGAAGESSTAREKTPDAPPRAPTTGAPAVNPPQPQGGGDFEAKVTKLVELGFDRASVIQALKLFNG

SEQ ID NO: 85 - DNA, 760 bp, Oryza sativa
  CDS (1)..(759)
gaatctggaatcttcaggcaaattcttagaggcaaacttgatttggaatctgatccgtggcctagtatatctgatagtgctaaagatctagtccgtaatatgcttatccgtgatcctacaaagagatttactgctcacgaggttctctgtcatccatggattgttgatgatgctgtggcacctgataagcctattgattctgctgttttgtcaaggctgaaacacttttctgcaatgaacaagctcaagaagatggctttgagggttattgctgaaagcctatctgaagaagagatcggaggtttgaaggaattgtttaaaatgatcgatactgacaatagtgggacgataacttatgatgaactgaagaatggcctgaaaagggtgggctcagatctaatggaaccagaaatccaggctttaatggatgccgctgatattgacaacagtggaaccatcgactatggtgaattcttagcagctactttgcacatgaataaactggagagggaggaaaacttggtgtcagcattcacgttctttgataaggatggaagtggcttcataaccattgatgagctctcgcaagcctgcgaacagtttggcctttctgatgttcatcttgaggatatgatcaaagatgtggatcaaaataatgatggacaaattgattacagcgagtttgccgcgatgatgagaaagggcaatgctggtggagccaatgctggtggagtcacttctactggtggaacaggaagga

SEQ ID NO: 86 - protein, 253 aa, Oryza sativa
ESGIFRQILRGKLDLESDPWPSISDSAKDLVRNMLIRDPTKRFTAHEVLCHPWIVDDAVAPDKPIDSAVLSRLKHFSAMNKLKKMALRVIAESLSEEEIGGLKELFKMIDTDNSGTITYDELKNGLKRVGSDLMEPEIQALMDAADIDNSGTIDYGEFLAATLHMNKLEREENLVSAFTFFDKDGSGFITIDELSQACEQFGLSDVHLEDMIKDVDQNNDGQIDYSEFAAMMRKGNAGGANAGGVTSTGGTGR

SEQ ID NO: 87 - DNA, 567 bp, Oryza sativa
  CDS (1)..(567)
gtctccttcccttactccccacggccggccgcgttggctgcaggcgctcgggcctcgcgggttagccccgtcgtggtcgccgccggcggcgggcaccagcggcttatggggtcgttgactaacacccaggggctcaggtttggagtggttgtggcacggttcaatgagattgtcaccaacttgctactgcagggagctcttgagacatttgagagatattccgtcaaaaaagaaaatataacagttctaagtgttcctggcagttttgaaattcctgttgcggcacaaaagcttgggaagtctggaaagtttgatgccaattttgtgcattggcgctgtgcattcagaggtgacacaacccactacggtgctgttgcaaactctgctgcttcaggtgtactgtctgctggattgtctgctgagatcccatgcatatttggtgttctgacatgtgatgacatggaccaggctctaaatcgtgctggtggtaaggctggaaacaagggagctgaagccgctctaactgcaatcgagatggcctcgctgttccagcatcacctggcctga

SEQ ID NO: 88 - protein, 188 aa, Oryza sativa
VSFPYSPRPAALAAGARASRVSPVVVAAGGGHQRLMGSLTNTQGLRFGVVVARFNEIVTNLLLQGALETFERYSVKKENITVLSVPGSFEIPVAAQKLGKSGKFDANFVHWRCAFRGDTTHYGAVANSAASGVLSAGLSAEIPCIFGVLTCDDMDQALNRAGGKAGNKGAEAALTAIEMASLFQHHLA

SEQ ID NO: 89 - DNA, 509 bp, Oryza sativa
  CDS (1)..(507)
ggaaggaagcctgttgcggcccaacattacaacaagggtgataaagatggaacaagcactggcagccgatgcacttctgttgcatgggtaccggagcgtgaaggaatctttgttgttagccattctgatggaaatctgtatgtgtacgataaatgcaaagatggaaacactgagtgtacattcccagctataaaggatccggctcagttaatgatttcacatgcaaagtccagcaagagcaacccaattgctagatggcatgtttgccaaggttcaatcaacgccatctccttttcaccagatggagcatatttagcaactgttgggcgagatggttatttgagagtgtttgacttttcgaaggagcaactaatatttggtgggaaaagttattatggtgcactattgtgttgcacatggagctcggatggcaaatatctgttgactggtggtgaagatgatcttgtgcaggtatggagcatggatgacagaaagatagtcgcgtgggg

SEQ ID NO: 90 - protein, 169 aa, Oryza sativa
GRKPVAAQHYNKGDKDGTSTGSRCTSVAWVPEREGIFVVSHSDGNLYVYDKCKDGNTECTFPAIKDPAQLMISHAKSSKSNPIARWHVCQGSINAISFSPDGAYLATVGRDGYLRVFDFSKEQLIFGGKSYYGALLCCTWSSDGKYLLTGGEDDLVQVWSMDDRKIVAW

SEQ ID NO: 91 - DNA, 714 bp, Oryza sativa
  CDS (1)..(714)
atgctggtgcagcgcagggacggcgacacgggtccggccgtcaggctcagggtctcccacggcgcctccttccgcgacgtcgccgtgccggcgcactccaccttcggtgaattgaagggggtccttacccaggcaactggcgtagagcctgaaaggcagaggctcttcttccgtgggaaggagaagagtgacaatgagttcctgcatacagctggggtcaaggatggagcaaaacttcttctacttgagaagcctgcccctgccaatgtagagcagagggccgagccagtaattatggatgagagcatgatgaaggcttgtgaggctgttggccgtgtaagagctgaagttgacagactctctgccaaggtatgtgatttggagaagagtgtgtttgcagggagaaagattgaggataaagattttgttgtcttgacggagcttcttatgatggagctgctgaaacttgatggcatagaggcagagggagaagcaagggcacaaaggaaggctgaggtacgccgtgtccaaggtcttgtggagacgttggataagctgaaggcaagaaatgccaatcccttcagcgatcaaaacaaatctgtttcagtgacaacgcagtgggagacgttcgacaatggcatgggcagcttgaatgcacccccaccacgggtttcttccacacaaataaacaccgactgggagcaattcgactag

SEQ ID NO: 92 - protein, 237 aa, Oryza sativa
MLVQRRDGDTGPAVRLRVSHGASFRDVAVPAHSTFGELKGVLTQATGVEPERQRLFFRGKEKSDNEFLHTAGVKDGAKLLLLEKPAPANVEQRAEPVIMDESMMKACEAVGRVRAEVDRLSAKVCDLEKSVFAGRKIEDKDFVVLTELLMMELLKLDGIEAEGEARAQRKAEVRRVQGLVETLDKLKARNANPFSDQNKSVSVTTQWETFDNGMGSLNAPPPRVSSTQINTDWEQFD

SEQ ID NO: 93 - DNA, 411 bp, Oryza sativa
  CDS (1)..(411)
acctcctcaggagatcagcagatggtgacggtggcggagaggttcccgcgggaggtgagctcggaggcggtgttccggtgcgtgcggctggggccggtcgaccaggccgaggcggaggtcgcgtaccagacggccgtcagcatcggcggccacgtgttcaagggcatcctgcacgacgtcggccccgaagccctggcggtcgccggcggcggcggcgccagcgagtaccacttccgcctcaccggcgacgggtcctcgccgagcaccgccgcggccggcgaggcaggctccggcggcggcggcaacatcatcgtgtcatcggctgtggtgatggacccgtacccgacgcccgggccctacggcgcgttccccgccggcacgccattcttccacggccacccgcggccgtga

SEQ ID NO: 94 - protein, 136 aa, Oryza sativa
TSSGDQQMVTVAERFPREVSSEAVFRCVRLGPVDQAEAEVAYQTAVSIGGHVFKGILHDVGPEALAVAGGGGASEYHFRLTGDGSSPSTAAAGEAGSGGGGNIIVSSAVVMDPYPTPGPYGAFPAGTPFFHGHPRP

SEQ ID NO: 95 - DNA, 982 bp, Oryza sativa
  CDS (1)..(981)
atggagttcgaggcggacggcgcccggtggccggagccgcgaggcgacgctgccggggcgccgccgctggagcgtggcgatgcgccttcccctcgcttcgattcgtctcgtgccctaagattgctgagagagcttggctcaaatgtaacagaagatttggttgtgctgatgccaaatttgctatcatttctgaaacatgatgatcctgtggttgttaatcaatccatagctagtgggacaaatttatttgctgctgtattggaagagatgacacttcagattaataagtgtggaagggttgatgcttggcttgaagagatgtgggcttggacgaagcagtttaaagatgcagtccataatctgatccatgagtctgtcccagttgctactaaactgtttgctgtaaagttcattgaaacatggatcctgtgtttcgcacctcaatccaaaagtgaccggatgcagccaactgaaggaaggaacaggaggttgtttgatagttcaagattatctcaattccatcccagccttaaccctgctgttctcgaagctgatgcaaacagggctctcatcctccttgtggatatactgcagtcagcttgtgctcatcaaggatccttcctagttggcaccattaattctcttgcagctattgcaaagaatagacctgtttactacgaacgcatactgccagtgctacttggttttgaccctagtttggaggttgcaaaaggagctcatcctgcaagtctgcggtattccctgaaaacagcttttttagggtttctaaggagtccttgccaggcaatgattgagtccaaggatactctggtaaggcagcttcgtgttctgagccctggtgaagcaacagaacagattattaggcaagtagagaagatgactagaaatattgagcgcgcttctcgtgctagcaaggatgaaccttcaacgttggatatgccttacggagatgttagtcgga

SEQ ID NO: 96 - protein, 327 aa, Oryza sativa
MEFEADGARWPEPRGDAAGAPPLERGDAPSPRFDSSRALRLLRELGSNVTEDLVVLMPNLLSFLKHDDPVVVNQSIASGTNLFAAVLEEMTLQINKCGRVDAWLEEMWAWTKQFKDAVHNLIHESVPVATKLFAVKFIETWILCFAPQSKSDRMQPTEGRNRRLFDSSRLSQFHPSLNPAVLEADANRALILLVDILQSACAHQGSFLVGTINSLAAIAKNRPVYYERILPVLLGFDPSLEVAKGAHPASLRYSLKTAFLGFLRSPCQAMIESKDTLVRQLRVLSPGEATEQIIRQVEKMTRNIERASRASKDEPSTLDMPYGDVSR

SEQ ID NO: 97 - DNA, 1257 bp, Oryza sativa
  CDS (1)..(1257)
atggtcgaggtggaggaagtcagcaacaagatgcaggcgcagatgcgcctccaccccgcggcggcggcggaggaggaggacgccgacctcccgctccctgccctcttcgacaaggcgtcccacctccactccctcgcctccagctcctccctcgatcaggaagggatccgcaagggggtcgacctgctgcggcggtgcgacgagatggtcagtaagctcggcctcttctcctccaacgagaccaaggatgacgtctccactgccaacctcaaatacctactcgtgccgtactaccttggggaaatgactgaaagggtagcgcaggaagatcggatcccagtccttaaggcgtcgcaggatcatttgaaggaattcatttctatctgtgaagcactggagcttatatcagaggatgagcttgaattgtctaggcagaagcaacctgataccatggcaaatcgaagagcacagaaggctgcacggttcaagcgccaaaaggctgcagaaacaaagctcctagaaatcaaggagaggaaagaaaggcgtaggcggtcattgagagcagctgctttatcagctcctattgaagctggggaggaagatgcttttgaggatgatggagaggaagaaagagaggcatggttagctactatctcattggctctatgcaaggcttttgaccttcttgacatgttaaagaaggaagaagaaatgcttctggcagtaaaagaaaggcaagcgaaggatggtaatgcatttgctcgtgaaatgcttgatgaacgtacaaaaaaggctgaagcatggcaccataatgctgccaaccgtgcaccatattccaagccagctgatccaatcacttgtgcaacatttgctcaagatgtcattgaaggtagagcaagtgtttcacaagcacatgagcacaaacaccagccgctgatatttggccctgcaagtcttgttggtggaggactaaccagtgaaagagagagaatggcagcacaagtttttcagccaagttacaggttgccaacgatgagcatagaagaagctggcttacgtgagatgaaaatgatggagaaatggcaagaaagaactgctaagatgattcaagaatcaaactccgcatggcacaaggatggcagtcggtcagcccaagaggatgaggacgctgaagaggagaaagcaagagcatgggatgactggaaggacgataaccctcgtggtgcaggcaacaagaagctcactccctgtggctag

SEQ ID NO: 98 - protein, 418 aa, Oryza sativa
MVEVEEVSNKMQAQMRLHPAAAAEEEDADLPLPALFDKASHLHSLASSSSLDQEGIRKGVDLLRRCDEMVSKLGLFSSNETKDDVSTANLKYLLVPYYLGEMTERVAQEDRIPVLKASQDHLKEFISICEALELISEDELELSRQKQPDTMANRRAQKAARFKRQKAAETKLLEIKERKERRRRSLRAAALSAPIEAGEEDAFEDDGEEEREAWLATISLALCKAFDLLDMLKKEEEMLLAVKERQAKDGNAFAREMLDERTKKAEAWHHNAANRAPYSKPADPITCATFAQDVIEGRASVSQAHEHKHQPLIFGPASLVGGGLTSERERMAAQVFQPSYRLPTMSIEEAGLREMKMMEKWQERTAKMIQESNSAWHKDGSRSAQEDEDAEEEKARAWDDWKDDNPRGAGNKKLTPCG

SEQ ID NO: 99 - DNA, 963 bp, Oryza sativa
  CDS (1)..(963)
gtgctggagacgctgatcggcggtgaccacttctcggaggaggaggcggaggcgacgctgcggctgctgctggaggaggagaacgaggcgcgcatcgccgccttcctcgtgctcctcagggccaagggcgagacctacgaagagatcgtggggttggcgaaggcgatgataggctgctgcgtccgggtcgacgggctcgatgacgccgtcgacattgtcggcaccggcggggacggcgcggacaccgtcaacatctccaccggctccaccatcctcgccgccgcggcgggtgccaaagtcgccaagcaagggagcagagctagctcgtcggcctgcggcagcgccgatggtattaaacgatgtgtcaatgaggtgggtgttggattcatgatgtctgcaaactatcatccagcaatgaaaatcgtgaaacctgtgaggaagaagctgaaaataaagacagttttcaatatccttggtcctctcttaaatccagcaagggtgccttatgctgttattggtgtttaccacgagaacatagttaccaagatggctaaggcagctcagaaatttggaatgaagagagcattggttgtccattcgaagggtttggatgaaataagcccacttgggcctggatatatccttgatgtcacaccaagaaagattgaaaaaatgctcttcgatccattggattttggtataccccgctgcacgctggaagatctaaaaggaggtgatccagcgttcaacgcaaaagttctccaggatgttcttgctggtcaaagaggttcaattgctgatgctctcgtgctgaatgctgcagcatctcttcttgtcagtggtaaagtaaatactttgcatgatggtgtagcgttagcacaggaaacacaacgctccggggaggccatcaacacacttgaatcctggataaagatttccaatgtaagtacttctgataattaa

SEQ ID NO: 100 - protein, 320 aa, Oryza sativa
VLETLIGGDHFSEEEAEATLRLLLEEENEARIAAFLVLLRAKGETYEEIVGLAKAMIGCCVRVDGLDDAVDIVGTGGDGADTVNISTGSTILAAAAGAKVAKQGSRASSSACGSADGIKRCVNEVGVGFMMSANYHPAMKIVKPVRKKLKIKTVFNILGPLLNPARVPYAVIGVYHENIVTKMAKAAQKFGMKRALVVHSKGLDEISPLGPGYILDVTPRKIEKMLFDPLDFGIPRCTLEDLKGGDPAFNAKVLQDVLAGQRGSIADALVLNAAASLLVSGKVNTLHDGVALAQETQRSGEAINTLESWIKISNVSTSDN

SEQ ID NO: 101 - DNA, 936 bp, Oryza sativa
  CDS (1)..(936)
atggcgacgcggctgctgtgttggacggcgctcctcctccccatcatcgccgccaccgccgccgcctcgccgcttcccgaggcgtgcccggtgcctactgcggcggaggaaatccttgggcctggcggcacatgcacgacgctggatcgccgcggcgaccctgtcggcgtcatcgagggggatgaggtaacattggcgaaggccattactcttcttcacatgaacaaagatgattacattgctgtactcttctatgcttcctggtgcccattctcacaagaatgcaagccaaattttgagatattagcatctttgttcccatctattcggcattttgcgtttgaagaatcctcaatcaggccaagtataatatcaagatatgggattcatggttttccaacactatttctcttgaattcaactatgcgagtgcggtatcatggaccacggactgttaagtccctggctgctttctaccgtgatgtttcaggtttcgatgtttcaatgacgtcagaggccgtgctacattcagtagatggtattgagcttaagaaggatgctgaacaggaaaattgtccattctggtgggcacgctcaccggagaaaatacttcagcaggatacttatctagcactggcaactgcatttgtaatcttgaggttactgtatcttctctttccaaagataggttccttcgccaaacgggcgtggaggaggcatactctttttccaaacttggtgggtgtgcatgaatatttcttcacctaccttgaacaagcaagacacaaattctttaggttatacccttcgaagcgagggaatttacaggaaggggccaggaatgccactgcttgggcttccaagtcattagcatccgtctcaatcggagaaccaagcactattggaaggacaaactctacaaatgagctaagataa

SEQ ID NO: 102 - protein, 311 aa, Oryza sativa
MATRLLCWTALLLPIIAATAAASPLPEACPVPTAAEEILGPGGTCTTLDRRGDPVGVIEGDEVTLAKAITLLHMNKDDYIAVLFYASWCPFSQECKPNFEILASLFPSIRHFAFEESSIRPSIISRYGIHGFPTLFLLNSTMRVRYHGPRTVKSLAAFYRDVSGFDVSMTSEAVLHSVDGIELKKDAEQENCPFWWARSPEKILQQDTYLALATAFVILRLLYLLFPKIGSFAKRAWRRHTLFPNLVGVHEYFFTYLEQARHKFFRLYPSKRGNLQEGARNATAWASKSLASVSIGEPSTIGRTNSTNELR

SEQ ID NO: 103 - DNA, 834 bp, Oryza sativa
  CDS (1)..(834)
atggccatgaagggacccggcctcttctccgacattggcaagagggccaaggatctgctcaccaaggactacacctatgaccagaagctgaccgtctccaccgtcagctcctccggagtgggcctcacttccacagctgtgaagaaaggggggctttatactcttgatgtcagctcagtttacaagtacaagagtactctcgtcgatgtcaaagtggacacagaatctaatatctctactactttgactgtgtttgatgtccttccatccacaaagcttgtgacaagtgtcaagctgcctgactacaattctggaaaggtggagatgcaatacttccatgagaatgcaagttttgccactgctgttggcatgaagccatctcctgtggttgaattttctggaacagctggtgctcaaggacttgcctttggtgcagaagctgggtttgacactgctacaggaaaatttaccaagtacagtgctgcgataggtgtaaccaagccagattatcatgctgcaatcgttctggcggacaaaggtgacaccgttaaagtgtcaggtgtatatcaccttgatgataagcagaaatcctctgttgttgctgaattaacccgcaggctctcaacaaatgagaacactctcactgttggtggcctgtacaaggttgaccccgagacagctgtgaaggcaaggctcaacaacactggaaagcttgctgctcttctccagcatgaggttaaacccaagtcggttttgacaatctctggtgaattcgacaccaaggccttggacagaccccccaagtttggtctagcgcttgcactcaggccctga

SEQ ID NO: 104 - protein, 277 aa, Oryza sativa
MAMKGPGLFSDIGKRAKDLLTKDYTYDQKLTVSTVSSSGVGLTSTAVKKGGLYTLDVSSVYKYKSTLVDVKVDTESNISTTLTVFDVLPSTKLVTSVKLPDYNSGKVEMQYFHENASFATAVGMKPSPVVEFSGTAGAQGLAFGAEAGFDTATGKFTKYSAAIGVTKPDYHAAIVLADKGDTVKVSGVYHLDDKQKSSVVAELTRRLSTNENTLTVGGLYKVDPETAVKARLNNTGKLAALLQHEVKPKSVLTISGEFDTKALDRPPKFGLALALRP

SEQ ID NO: 105 - DNA, 1254 bp, Oryza sativa
  CDS (1)..(1254)
atgttcgggcgcgcgccgaagaagagcgacaacaccaagtactacgagatcctgggggtccccaagaccgcctcccaggacgacctcaagaaggcgtaccgcaaggccgccatcaagaaccaccccgacaagggcggcgaccccgagaagttcaaggagcttgcacaagcttatgaggtattgagtgacccggagaaacgtgaaatctatgaccaatatggtgaagatgccctcaaggaaggaatgggtggaggcggatcccatgttgatccatttgacatcttttcatcattctttggaccttcttttggtggtggtggcagcagcaggggcagaaggcaaaggaggggagaggatgtgatccatccgcttaaggtttctctagaagatctttacaatggtacttcaaagaagctctctctttcccgcaatgtcctctgcgccaagtgcaagggcaagggttccaagtctggtgcttccatgaggtgcccaggttgccaggggtctggcatgaaaatcaccatccgccagctggggccttccatgatacagcagatgcagcagccttgcaatgagtgtaaggggactggagagagcattaatgagaaggatcgctgcccaggctgcaagggcgagaaggttattcaggagaagaaggttctggaggttcacgttgagaaggggatgcaacacaatcagaagatcactttccctggtgaagctgatgaggcgcctgataccgttacgggagacattgtattcgtcctccagcagaaggaccactccaagttcaaaaggaagggcgatgatctcttttatgagcacaccttatctctgactgaagcactttgtggtttccaatttgtcctgacacatctggacaacagacagctgctcattaagtcaaaccccggtgaagttgttaagcctgaccaattcaaggcaataaacgatgagggaatgccaatgtaccagaggcctttcatgaaggggaagctctacattcatttcacggtggagttccctgattccctggcgcctgaacaatgcaaggctctcgaggctgtgcttccaccgaagcctgcatcccagctgacagaaatggagatagatgaatgcgaggagaccacgatgcacgatgtcaacaacattgaggaagagatgcgcaggaaagcccaagctgctcaggaggcgtatgatgaggacgatgagatgcctggaggtgcccagagagttcagtgcgcgcaacagtaa

SEQ ID NO: 106 - protein, 417 aa, Oryza sativa
MFGRAPKKSDNTKYYEILGVPKTASQDDLKKAYRKAAIKNHPDKGGDPEKFKELAQAYEVLSDPEKREIYDQYGEDALKEGMGGGGSHVDPFDIFSSFFGPSFGGGGSSRGRRQRRGEDVIHPLKVSLEDLYNGTSKKLSLSRNVLCAKCKGKGSKSGASMRCPGCQGSGMKITIRQLGPSMIQQMQQPCNECKGTGESINEKDRCPGCKGEKVIQEKKVLEVHVEKGMQHNQKITFPGEADEAPDTVTGDIVFVLQQKDHSKFKRKGDDLFYEHTLSLTEALCGFQFVLTHLDNRQLLIKSNPGEVVKPDQFKAINDEGMPMYQRPFMKGKLYIHFTVEFPDSLAPEQCKALEAVLPPKPASQLTEMEIDECEETTMHDVNNIEEEMRRKAQAAQEAYDEDDEMPGGAQRVQCAQQ

SEQ ID NO: 107 - DNA, 864 bp, Oryza sativa
  CDS (1)..(864)
atggcggccatatcttcgcttcccttcgcggcactgcgccgggccgccgactgcaggccgtcgacggcggcggcggcggcgggggcgggggcgggggccgtcgtgctcagcgtgaggccccggcgggggtcgcgctcggtggtgcgctgcgtcgccacggcgggcgatgttccacccactgtcgcagaaacaaagatgaattttctcaagtcatacaagcgtcctatcctaagcatttacagtacagttctacaagaacttttggtacagcaacatctgatgagatacaaaacaacatatcaatatgatgcggtgtttgctcttggttttgtgaccgtctatgaccaactcatggaagggtaccctagcaatgaggatagggatgcaatcttcaaagcatatataacagcgttaaacgaagaccctgagcaatacagagctgacgcacaaaagatggaagagtgggctcgttcccagaatggtaattctttagttgagttttcatccaaagatggagaaatagaggccattctgaaagatatttcagaaagggcccagggtaagggaagcttcagctacagccggttctttgcagttggcttgttccgtttgcttgagcttgcaaatgcaacagagccaaccatactagacaagctttgcgctgctctaaacatcaacaaaagaagtgtcgacagggatctcgatgtttaccggaacatactctccaaattggtccaggctaaggaacttctcaaggaatacgtggaaagggaaaagaagaagagagaggaaagatcagagaccccaaaatcgaatgaagctgttacgaaatttgacgggagtctcaattccatgaggcattaa

SEQ ID NO: 108 - protein, 287 aa, Oryza sativa
MAAISSLPFAALRRAADCRPSTAAAAAGAGAGAVVLSVRPRRGSRSVVRCVATAGDVPPTVAETKMNFLKSYKRPILSIYSTVLQELLVQQHLMRYKTTYQYDAVFALGFVTVYDQLMEGYPSNEDRDAIFKAYITALNEDPEQYRADAQKMEEWARSQNGNSLVEFSSKDGEIEAILKDISERAQGKGSFSYSRFFAVGLFRLLELANATEPTILDKLCAALNINKRSVDRDLDVYRNILSKLVQAKELLKEYVEREKKKREERSETPKSNEAVTKFDGSLNSMRH

SEQ ID NO: 109 - DNA, 2379 bp, Oryza sativa
  CDS (1)..(2379)
atggagaaggatcaccagcccgtcatcagcttgcgccccggcggcggcggcggcggcccccgccccggccgcctcttctcccccgccttcgccgccgccgcctccggctccggcgacttgctccgctcccacgtcggcggcgcatccaagattggtgatccaaattttgaggtgcgcgagcgtgttcgctatacaagagatcaacttctcgagctgcgtgagatcgttgacatacctgaggccatcttaattaagcaagagattgatatagagcttcatggtgaagatcagatttggggtcgccctgagtcagatgtgcaagtgcagacacaaacccaggcgcaaccgcacaatcggtatggtgagacagataaccgtgactggcgtgcacgcacggttcaacctccggcagctaatgaagagaagtcctgggacaacattcgtgaagctaaagcagcacatgcttcaagtggtcggcaacaagagcaagttaacaggcaggatcaattaaaccaccagtttgcttcaaaagctcaggttggcccgactcctgctcttatcaaggctgaggtaccttggtcagctagaagaggcaatctctcagagaaagatagagtcctgaaaacagtgaaaggtatactaaacaaactgacaccggagaaatttgatctactcaagggccaactaatggaatctggaattaccactgctgatattctaaaggatgttatttctctcatatttgagaaggctgtttttgagcccaccttctgtccgatgtatgctcaactttgttccgatctcaatgagaagctaccatcattcccttcggaagaaccaggtggcaaagagattacgttcaagcgcgtgctgttgaacaattgtcaggaagcatttgaaggcgctgagagcctaagggctgaaatagcaaaattgactggccctgaccaagagatggagagaagggacaaagaaaggattgtcaaactaagaacacttggaaatatccgtctaattggtgagctacttaagcaaaagatggtacctgaaaagatagttcatcacattgttcaggaactcttggggtctggacctgataaaaaggcttgccctgaagaggaaaacgttgaggctatttgtcagttcttcaatacaattggtaaacagcttgacgagaacccaaaatctcgtcgaattaatgatacctacttcattcagatgaaggagttaacaacaaaccttcagttggcaccacgtctgaggtttatggttcgtgatgtggttgatcttcgttcaaacaattgggtgcctcgacgtgaagagattaaggccaagacaatcagtgaaattcatgatgaggctataaagacacttggactacggccaggggcaacaggactcacgaggaatggccgtaatgcaccaggtggtcctctttcccctggtggattcccaatgaatcgaccaggaacaggagggatgatgcctgggatgcctggaacacctggtatgcctggatcaagaaagatgcctggaatgcctgggttagataatgataactgggaagttccacgttctaaatcaatgccaagaggcgactctcttcgtaaccagggtccgttgcttaataagccatcatctattaacaagccatcatctattaactccaggcttcttcctcatggaagtggagcactaattggtaagagtgctcttttgggcagtggtggtccaccatctcgcccttccagccttatggctagtcccactcatacaccagctcaaactgcaccatcaccaaaacctgtaagtgcagctccagctgttgtgcctgtcacagacaaagcagccggttcttcccatgagatgccagctgcagttcagaagaagacggtatcccttcttgaagagtattttggcatacgtattctggatgaagcacaacaatgtatcgaggagcttcagtgtcctgagtactactctgagattgtgaaagaagctatcaatcttgctctggataagggtcccaacttcattgatccccttgttaggctgctggagcatctgcacaccaagaaaattttcaagactgaggacctgaaaactggatgcttactgtatgcagccctgctggaagatattggtattgaccttcctctagctccagccttgtttggtgaagttgttgcacgactgagtttgtcgtgtagcttgagctttgaagttgttgaggagattctaaaagcagtggaggatacatacttccgcaaaggaatttttgatgctgtcatgaaaaccatgggtggaaactcttcaggtcaggctatcttgagctcgcatgctgtggtaatcgacgcctgcaacaaacttctgaaataa

SEQ ID NO: 110 - protein, 792 aa, Oryza sativa
MEKDHQPVISLRPGGGGGGPRPGRLFSPAFAAAASGSGDLLRSHVGGASKIGDPNFEVRERVRYTRDQLLELREIVDIPEAILIKQEIDIELHGEDQIWGRPESDVQVQTQTQAQPHNRYGETDNRDWRARTVQPPAANEEKSWDNIREAKAAHASSGRQQEQVNRQDQLNHQFASKAQVGPTPALIKAEVPWSARRGNLSEKDRVLKTVKGILNKLTPEKFDLLKGQLMESGITTADILKDVISLIFEKAVFEPTFCPMYAQLCSDLNEKLPSFPSEEPGGKEITFKRVLLNNCQEAFEGAESLRAEIAKLTGPDQEMERRDKERIVKLRTLGNIRLIGELLKQKMVPEKIVHHIVQELLGSGPDKKACPEEENVEAICQFFNTIGKQLDENPKSRRINDTYFIQMKELTTNLQLAPRLRFMVRDVVDLRSNNWVPRREEIKAKTISEIHDEAIKTLGLRPGATGLTRNGRNAPGGPLSPGGFPMNRPGTGGMMPGMPGTPGMPGSRKMPGMPGLDNDNWEVPRSKSMPRGDSLRNQGPLLNKPSSINKPSSINSRLLPHGSGALIGKSALLGSGGPPSRPSSLMASPTHTPAQTAPSPKPVSAAPAVVPVTDKAAGSSHEMPAAVQKKTVSLLEEYFGIRILDEAQQCIEELQCPEYYSEIVKEAINLALDKGPNFIDPLVRLLEHLHTKKIFKTEDLKTGCLLYAALLEDIGIDLPLAPALFGEVVARLSLSCSLSFEVVEEILKAVEDTYFRKGIFDAVMKTMGGNSSGQAILSSHAVVIDACNKLLK

SEQ ID NO: 111 - DNA, 1021 bp, Oryza sativa
  CDS (1)..(1020)
ccacgcgtccgctgtcgcctctgctcctcctcctcctgctccatctcctcctccatatcccactcgccaatctcgattccctcctccgctctacctcgccggagttcaccctgtgtgggactgggagcggcggcggcgtcggaggcaatggacgcttcgtcggtggcgctctacggccagctcaaggctgctcaaccattcttcttgttagctgggcctaatgtgattgaatcagaggagcatgtcctgaagatggcaaaacacatcaaaggcatcacaaccaagcttggtctgccacttgtgttcaagtccagctttgataaagcaaatcgtacatcatcaaaatccttccgtggtcctggtctggaggaaggcctgaagatacttgaaaaagtgaaagcaacatatgacattccagtggtcactgatgtgcatgaaagccaccagtgtgaagccgccggaagagtggccgacatcatacaaattccagctttcttctgtcgccagactgatcttctagtggctgctgccaagactggaaaaattatcaacatcaagaaaggacaattctgtgctccttctgttatggccaactctgcagagaaaatcagacttgctggaaatcaaaatgttatggtctgtgagcgtggcaccatgtttggctacaatgatctaattgttgatccaaggaattttgagtggctgagagaagctaattgtccagttgtagctgatgtaacgcatgctctacaacagcctgctggaaaaaagcttgatggtggaggtgttgcaagtgggggcttacgagaactaataccatgcatcgcaaggacttctgttgctgtcggagttgatggtattttcatggaggtacatgatgatcccttgaacgcaccttgtgatggcccaactcaatggccactgcgcaatttggaggagctattagaggagctgattgcaattgctcgagtcaccaagggaaagaagccactcaagatcgatctcacccccttcaaagaat

SEQ ID NO: 112 - protein, 340 aa, Oryza sativa
PRVRCRLCSSSSCSISSSISHSPISIPSSALPRRSSPCVGLGAAAASEAMDASSVALYGQLKAAQPFFLLAGPNVIESEEHVLKMAKHIKGITTKLGLPLVFKSSFDKANRTSSKSFRGPGLEEGLKILEKVKATYDIPVVTDVHESHQCEAAGRVADIIQIPAFFCRQTDLLVAAAKTGKIINIKKGQFCAPSVMANSAEKIRLAGNQNVMVCERGTMFGYNDLIVDPRNFEWLREANCPVVADVTHALQQPAGKKLDGGGVASGGLRELIPCIARTSVAVGVDGIFMEVHDDPLNAPCDGPTQWPLRNLEELLEELIAIARVTKGKKPLKIDLTPFKE

SEQ ID NO: 113 - DNA, 771 bp, Oryza sativa
  CDS (1)..(771)
atgtctcgggaggagaatgtctacatggccaagctggccgagcaggctgaaaggtatgaggagatggttgagtacatggagaaggttgcaaagactgtagatgtggaagagctcactgttgaggagcgcaacctcttgtctgttgcttacaagaatgtgattggtgcccgccgtgcctcctggcgtattgtctcatccattgaacagaaggaggagggtcgtggcaatgaggaacatgttactctgatcaaggagtaccgtggcaagattgaagctgagctgagcaagatttgcgatggtatcctgaagttgcttgactcacaccttgtgccctcatctactgctgcagaatctaaggtgttttacctcaagatgaagggtgattaccacaggtaccttgcggaatttaagactggtgccgagagaaaggaagctgctgagagcacaatggtggcttacaaggctgctcaggatattgctctggcggatcttgctcccacccatcccataaggcttggactggcacttaacttctctgtgttctactacgagattctaaactctccagacaaggcttgcaaccttgctaagcaggcgtttgacgaagccatctccgagttggataccctcggggaggagtcttacaaggacagcactttgatcatgcagctcctgagggacaacttgaccctctggacctctgacctcacggaggacggtggtgatgaggtgaaagaagcctccaagggcgacgcctgcgagggccagtaa

SEQ ID NO: 114 - protein, 256 aa, Oryza sativa
MSREENVYMAKLAEQAERYEEMVEYMEKVAKTVDVEELTVEERNLLSVAYKNVIGARRASWRIVSSIEQKEEGRGNEEHVTLIKEYRGKIEAELSKICDGILKLLDSHLVPSSTAAESKVFYLKMKGDYHRYLAEFKTGAERKEAAESTMVAYKAAQDIALADLAPTHPIRLGLALNFSVFYYEILNSPDKACNLAKQAFDEAISELDTLGEESYKDSTLIMQLLRDNLTLWTSDLTEDGGDEVKEASKGDACEGQ

SEQ ID NO: 115 - DNA, 1536 bp, Oryza sativa
  CDS (1)..(1536)
atggcgtccaacgccgcggctgcggcggcggtgtccctggaccaggccgtggcggcgtcggcggcgttctcgtcgcggaagcagctgcggctgcccgccgcggcgcgcggggggatgcgggtgcgggtgcgggcgcgggggcggcgggaggcggtggtggtggcgtccgcgtcgtcgtcgtcggtggcagcgccggcggcgaaggcggaggagatcgtgctccagcccatcagggagatctccggggcggttcagctgccagggtccaagtcgctctccaacaggatcctcctcctctccgccctctccgagggcacaacagtggtggacaacttgctgaacagtgaggatgttcactacatgcttgaggccctgaaagccctcgggctctctgtggaagcagataaagttgcaaaaagagctgtagtcgttggctgtggtggcaagtttcctgttgagaaggatgcgaaagaggaagtgcaactcttcttggggaacgctggaactgcaatgcgaccattgacagcagccgtgactgctgctggtggaaatgcaacttatgtgcttgatggagtgccacgaatgagggagagaccgattggtgacttggttgtcgggttgaaacaacttggtgcggatgtcgactgtttccttggcactgaatgcccacctgttcgtgtcaagggaattggaggacttcctggtggcaaggttaagctctctggttccatcagcagtcagtacttgagtgccttgctgatggctgctcctttggcccttggggatgtggagatcgaaatcattgacaaactaatctccattccttacgttgaaatgacattgagattgatggagcgttttggtgtgaaggcagagcattctgatagttgggacagattctatattaagggagggcagaagtacaaatctcctggaaatgcctatgttgaaggtgatgcctcaagcgcgagctatttcttggctggtgctgcaatcactggaggcactgtgacagttcaaggttgtggtacgaccagtttgcagggtgatgtcaaatttgctgaggtacttgagatgatgggagcaaaggttacatggactgacaccagtgtaaccgtaactggtccaccacgtgagccttatgggaagaaacacctgaaagctgttgatgtcaacatgaacaaaatgcctgatgttgccatgacccttgccgttgttgcactcttcgctgatggtccaactgctatcagagatgtggcttcctggagagtaaaggaaaccgaaaggatggttgcaattcggaccgagctaacaaagctgggagcatcggttgaagaaggtcctgactactgcatcatcaccccaccggagaagctgaacatcacggcaatcgacacctacgatgatcacaggatggccatggccttctccctcgctgcctgcgccgacgtgcccgtgacgatcagggaccctggttgcacccgcaagaccttccccaactacttcgacgttctaagcactttcgtcaggaactga

SEQ ID NO: 116 - protein, 511 aa, Oryza sativa
MASNAAAAAAVSLDQAVAASAAFSSRKQLRLPAAARGGMRVRVRARGRREAVVVASASSSSVAAPAAKAEEIVLQPIREISGAVQLPGSKSLSNRILLLSALSEGTTVVDNLLNSEDVHYMLEALKALGLSVEADKVAKRAVVVGCGGKFPVEKDAKEEVQLFLGNAGTAMRPLTAAVTAAGGNATYVLDGVPRMRERPIGDLVVGLKQLGADVDCFLGTECPPVRVKGIGGLPGGKVKLSGSISSQYLSALLMAAPLALGDVEIEIIDKLISIPYVEMTLRLMERFGVKAEHSDSWDRFYIKGGQKYKSPGNAYVEGDASSASYFLAGAAITGGTVTVQGCGTTSLQGDVKFAEVLEMMGAKVTWTDTSVTVTGPPREPYGKKHLKAVDVNMNKMPDVAMTLAVVALFADGPTAIRDVASWRVKETERMVAIRTELTKLGASVEEGPDYCIITPPEKLNITAIDTYDDHRMAMAFSLAACADVPVTIRDPGCTRKTFPNYFDVLSTFVRN

SEQ ID NO: 117 - DNA, 1167 bp, Oryza sativa
  CDS (1)..(1167)
atggcgtctgctactctcctcaagtcatctttccttcccaagaagtctgaatggggtgccacccgccaggctgccgcccccaagccggtgactgtctccatggttgtccgcgctggtgcctacgacgatgagcttgtcaagaccgcgaaaaccattgcatcaccaggaaggggtatccttgccatggatgagtcgaacgcgacctgcggtaagaggcttgcgtcaattggccttgagaacaccgaggccaaccgccaggcttaccggaccctccttgtcaccgcaccgggcttgggacagtacatctccggtgctatcctcttcgaggagactctgtaccagtcaactgtagatggcaagaagattgtcgacatcctcactgagcagaaaatcgttccaggtatcaaggtcgacaagggtcttgtgccccttgctggctccaacaacgagtcatggtgccaaggtcgcgacggccttgcctcgcgcgaggcggcatactaccagcagggcgctcgcttcgccaagtggcgcactgttgtcagcatccccaacggcccatctgaactcgccgtgaaggaggctgcctggggccttgcccgctacgccgccatttctcaggacaacgggctggtgccgattgtcgagcctgagatcctcctcgacggtgagcatggcatcgacaggaccttcgaggtggcgcagaaggtgtgggcggagaccttcttctacatggccgagaacaatgtgatgttcgagggcatcctcctcaagccaagcatggtgacacccggtgccgagtgcaaggacagggccacccctgagcaagtatctgactacaccctcaagctcctccacagaaggatcccccctgccgtccccgcgatcatgttcttgtcgggtgggcagtcggaggtggaggcgacgcagaacctgaacgcgatgaaccaggggcccaacccgtggcacgtgtcgttctcgtacgcgagggcgctgcagaacacgtgcctcaagacgtggggcgggcagccggagaacgtgaaggcggcgcaggaccgcctgctcctccgcgccaaggccaactcgctggcgcagctcggcaagtacaccagcgacggcgaggccgccgaggccaaggagggcatgttcgtcaagaactacgtctactaa

SEQ ID NO: 118 - protein, 388 aa, Oryza sativa
MASATLLKSSFLPKKSEWGATRQAAAPKPVTVSMVVRAGAYDDELVKTAKTIASPGRGILAMDESNATCGKRLASIGLENTEANRQAYRTLLVTAPGLGQYISGAILFEETLYQSTVDGKKIVDILTEQKIVPGIKVDKGLVPLAGSNNESWCQGRDGLASREAAYYQQGARFAKWRTVVSIPNGPSELAVKEAAWGLARYAAISQDNGLVPIVEPEILLDGEHGIDRTFEVAQKVWAETFFYMAENNVMFEGILLKPSMVTPGAECKDRATPEQVSDYTLKLLHRRIPPAVPAIMFLSGGQSEVEATQNLNAMNQGPNPWHVSFSYARALQNTCLKTWGGQPENVKAAQDRLLLRAKANSLAQLGKYTSDGEAAEAKEGMFVKNYVY

SEQ ID NO: 119 - DNA, 1434 bp, Oryza sativa
  CDS (1)..(1434)
atgtcaccacaaacagaaactaaagcaagtgttggatttaaagctggtgttaaggattataaattgacttactacaccccggagtacgaaaccaaggacactgatatcttggcagcattccgagtaactcctcagccgggggttccgcccgaagaagcaggggctgcagtagctgccgaatcttctactggtacatggacaactgtttggactgatggacttaccagtcttgatcgttacaaaggccgatgctatcacatcgagcccgttgttggggaggataatcaatatatcgcttatgtagcttatccattagacctatttgaagagggttctgttactaacatgtttacttccattgtgggtaacgtatttggtttcaaagccctacgcgctctacgtctggaggatctgcgaattccccctacttattcaaaaactttccaaggtccgcctcatggtatccaagttgaaagggataagttgaacaaatacggtcgtcctttattgggatgtactattaaaccaaaattgggattatctgcaaaaaattatggtagagcatgttatgagtgtctacgcggtggacttgattttaccaaagatgatgaaaacgtaaactcacaaccatttatgcgttggagggaccgttttgtcttttgtgccgaagctatttataaatcacaggccgaaaccggtgaaattaaggggcattacttgaatgcgactgcaggtacatgcgaagaaatgattaaaagagctgtatttgcgagggaattaggggttcctattgtaatgcatgactacttaaccggggggttcaccgcaaatactagtttggctcattattgccgcgacaacggcctacttcttcacattcaccgagcaatgcatgcagttattgatagacagaaaaatcatggtatgcatttccgtgtattagctaaagcattgcgtatgtctgggggagatcatatccacgctggtacagtagtaggtaagttagaaggggaacgcgaaatgactttaggttttgttgatttattgcgcgatgattttattgaaaaagatcgtgctcgcggtatctttttcactcaggactgggtatccatgccaggtgttataccggtggcttcagggggtattcatgtttggcatatgccagctctgaccgaaatctttggagatgattctgtattgcaatttggtggaggaactttaggacatccttggggtaatgcacctggtgcagcagctaatcgggtggctttagaagcctgtgtacaagctcgtaacgaagggcgcgatcttgctcgtgaaggtaatgaaattatccgatcagcttgcaaatggagtcctgaactagccgcagcttgtgaaatatggaaagcgatcaaattcgagttcgagccggtagataaactagatagctag

SEQ ID NO: 120 - protein, 477 aa, Oryza sativa
MSPQTETKASVGFKAGVKDYKLTYYTPEYETKDTDILAAFRVTPQPGVPPEEAGAAVAAESSTGTWTTVWTDGLTSLDRYKGRCYHIEPVVGEDNQYIAYVAYPLDLFEEGSVTNMFTSIVGNVFGFKALRALRLEDLRIPPTYSKTFQGPPHGIQVERDKLNKYGRPLLGCTIKPKLGLSAKNYGRACYECLRGGLDFTKDDENVNSQPFMRWRDRFVFCAEAIYKSQAETGEIKGHYLNATAGTCEEMIKRAVFARELGVPIVMHDYLTGGFTANTSLAHYCRDNGLLLHIHRAMHAVIDRQKNHGMHFRVLAKALRMSGGDHIHAGTVVGKLEGEREMTLGFVDLLRDDFIEKDRARGIFFTQDWVSMPGVIPVASGGIHVWHMPALTEIFGDDSVLQFGGGTLGHPWGNAPGAAANRVALEACVQARNEGRDLAREGNEIIRSACKWSPELAAACEIWKAIKFEFEPVDKLDS

SEQ ID NO: 121 - DNA, 1401 bp, Oryza sativa
  CDS (1)..(1401)
atggctgctgccttctcctccaccgttggagctccggcgtccactccgaccaacttcctggggaagaagctgaagaagcaggtgacatcggcggtgaactaccatggcaagagctccaacatcaacaggttcaaggtgatggccaaggagctggacgagggcaagcagaccgaccaggacaggtggaagggtctcgcctacgacatctccgatgaccagcaggacatcaccagggggaagggtttcgtcgactcccttttccaggctcccacgggtgatggcacccacgaggccgtcctcagctcctacgagtacctcagccagggtctcagaacgtacgacttcgacaacaccatgggaggcttctacatcgcccctgctttcatggacaagctcgtcgtccacatctccaagaacttcatgaccctccccaacatcaaggtcccactcatcctgggtatctggggaggcaagggtcagggaaaatccttccagtgtgagctcgtcttcgccaagatggggatcaaccccatcatgatgagcgccggagagctggagagcggcaacgccggagagccggcgaagctgatcaggcagcggtaccgtgaggcggcagacatcatcaagaaggggaagatgtgctgcctcttcatcaacgatctggacgcgggtgcaggtcgcatgggaggcaccacccagtacacggtgaacaaccagatggtgaacgccaccctgatgaacatcgccgacaacccaaccaacgtgcagctccccgggatgtacaacaaggaggacaacccccgtgtccccatcatcgtcaccggcaacgacttctccacgctgtacgcgccgctcatccgtgacgggcgtatggagaagttctactgggctcccacccgcgacgaccgtgtcggcgtctgcaagggtatcttccgcaccgacaacgtccccgacgaggacatcgtcaagatcgtcgacagcttcccaggccaatccatcgatttcttcggcgctcttcgtgcccgtgtttacgacgacgaggtgcgcaagtgggtgtcggacacgggtgtggagaacattggcaagaggctggtgaactcgagggagggcccaccggagttcgagcagcccaagatgacgatcgaaaagctcatggagtacggatacatgcttgtgaaggagcaggagaacgtcaagcgtgtgcagctggctgagcagtacttgagcgaggctgctcttggtgacgctaactccgacgccatgaagactggttccttctacgggcaaggagcacagcaagcaggtaacctgcctgtgccggaaggttgcaccgaccctgttgccaagaacttcgacccaacggcgaggagcgacgacggcagctgcctttacaccttttaa

SEQ ID NO: 122 - protein, 466 aa, Oryza sativa
MAAAFSSTVGAPASTPTNFLGKKLKKQVTSAVNYHGKSSNINRFKVMAKELDEGKQTDQDRWKGLAYDISDDQQDITRGKGFVDSLFQAPTGDGTHEAVLSSYEYLSQGLRTYDFDNTMGGFYIAPAFMDKLVVHISKNFMTLPNIKVPLILGIWGGKGQGKSFQCELVFAKMGINPIMMSAGELESGNAGEPAKLIRQRYREAADIIKKGKMCCLFINDLDAGAGRMGGTTQYTVNNQMVNATLMNIADNPTNVQLPGMYNKEDNPRVPIIVTGNDFSTLYAPLIRDGRMEKFYWAPTRDDRVGVCKGIFRTDNVPDEDIVKIVDSFPGQSIDFFGALRARVYDDEVRKWVSDTGVENIGKRLVNSREGPPEFEQPKMTIEKLMEYGYMLVKEQENVKRVQLAEQYLSEAALGDANSDAMKTGSFYGQGAQQAGNLPVPEGCTDPVAKNFDPTARSDDGSCLYTF

SEQ ID NO: 123 - DNA, 1002 bp, Oryza sativa
  CDS (1)..(1002)
atggcagcatcgctccaagccgcggccaccctgatgcagccggccaagctcggcggccgggcctcctccgccgcgctgccatcgcgcccgtcttcgcacgtcgccagggcgttcggcgtcgacaccggtgccgccggcaggatcacgtgctccctgcagtccgacatccgggaggtcgccaacaagtgcgccgatgccgccaagctcgccggcttcgccctcgccacctcagctctgctcgtctcgggcgccagcgcggagggcgtgccgaggaggcttaccttcgacgagattcagagtaagacgtacatggaggtgaagggaaccggcacggcgaaccagtgcccgacggtggagggcggcgtcgactccttcgccttcaaggccggcaagtacaacatgaagaagttctgcctggagccgacgtccttcaccgttaaggcggagggcgtggccaagaacgcgccacccgagttccagaagaccaagctcatgacccgcctgacctacaccctcgacgagatcgagggcccgctcgaggtcagctccgacggaaccatcaagttcgaggagaaggacggaatcgactacgccgccgtcaccgtgcagctgccgggaggcgagcgcgtgccgttcctcttcaccatcaagaatctggtcgccaccggcaagccggagagcttcggcgggcccttcctcgtgcccagctaccgtggttcgtccttcctcgacccaaagggccgcggtggctctaccggctacgacaacgctgtggcgctccccgccggaggcagaggagacgaggaggagctcgctaaggagaacgtcaagaacgcctcgtcgtcgacgggcaacatcacgttgagcgtcaccaagagcaagccagagaccggcgaggtgattggcgtcttcgagagcgtgcagccgtcggacacagacctcggcgccaaggtgcccaaggatgtcaagatccaaggggtgtggtacgcgcagctcgagtag

SEQ ID NO: 124 - protein, 333 aa, Oryza sativa
MAASLQAAATLMQPAKLGGRASSAALPSRPSSHVARAFGVDTGAAGRITCSLQSDIREVANKCADAAKLAGFALATSALLVSGASAEGVPRRLTFDEIQSKTYMEVKGTGTANQCPTVEGGVDSFAFKAGKYNMKKFCLEPTSFTVKAEGVAKNAPPEFQKTKLMTRLTYTLDEIEGPLEVSSDGTIKFEEKDGIDYAAVTVQLPGGERVPFLFTIKNLVATGKPESFGGPFLVPSYRGSSFLDPKGRGGSTGYDNAVALPAGGRGDEEELAKENVKNASSSTGNITLSVTKSKPETGEVIGVFESVQPSDTDLGAKVPKDVKIQGVWYAQLE

SEQ ID NO: 125 - DNA, 381 bp, Oryza sativa
  CDS (1)..(381)
atgatcacctcgccgctggtggcgccggcccgggccaagggccttccgtccatctcccgccggggatcctccttcgccatcgtctgcagcggtgggaagaagatcaagaccgacaagccctacgggattggaggtggcatgtcagtcgatattgatgcatctggcaggaaaagcacggggaagggtgtgtaccaattcgttgacaagtacggcgcaaacgtcgacggctacagcccaatctactcgccggaggaatggtctcccaccggtgacacctacgttggtggaaccaccgggcttctgatctgggccgtgaccctcgccgggctcctcggcggcggcgccctcctcgtctacaacaccagcgccctcgccggctaa

SEQ ID NO: 126 - protein, 126 aa, Oryza sativa
MITSPLVAPARAKGLPSISRRGSSFAIVCSGGKKIKTDKPYGIGGGMSVDIDASGRKSTGKGVYQFVDKYGANVDGYSPIYSPEEWSPTGDTYVGGTTGLLIWAVTLAGLLGGGALLVYNTSALAG

SEQ ID NO: 127 - DNA, 345 bp, Oryza sativa
  CDS (1)..(345)
atgccgagggccacgagcgatgcgaagcttctaattcagtccctgggcaaggcttatgctgccacaccaacaaatctcaagatcattgacctctatgtggtctttgcagtcgccactgcccttattcaggttgtttacatgggaatagtggggtcatttcctttcaactctttcctttctggcgtcctctcatgcataggaactgcagtcctcgctgtttgccttcgtattcaagttaacaaagataacaaggaattcaaggatcttcctcctgaaagggcgtttgcagatttcgttctgtgcaatctggtgctccacttggtgatcatgaacttccttggttga

SEQ ID NO: 128 - protein, 114 aa, Oryza sativa
MPRATSDAKLLIQSLGKAYAATPTNLKIIDLYVVFAVATALIQVVYMGIVGSFPFNSFLSGVLSCIGTAVLAVCLRIQVNKDNKEFKDLPPERAFADFVLCNLVLHLVIMNFLG

SEQ ID NO: 129 - DNA, 786 bp, Oryza sativa
  CDS (1)..(786)
atggctggggcctctgccaaggtcgtcgcgatgctgctctccgtgctcgccacgtacggcttcgccgccggcgtcgtctacaccaacgactggctcccggccaaggccacctggtacggccagcccaacggcgccggacccgacgacaacggcggtgcgtgcgggttcaagaacaccaaccagtacccgttcatgtccatgacctcctgcggcaacgagcctctgttccaggacggcaagggctgtggcgcctgctaccagatacggtgcaccaacaacccgtcgtgctccgggcagcccaggacggtgatcatcacggacatgaactactaccccgtggccaggtaccacttcgacctgagcggcacggcgttcggcgccatggcgaggccggggctgaacgaccagctccgccacgccggcatcatcgacatccagttcaggcgcgtcccgtgctaccaccgcggcctctacgtgaacttccacgtcgaggccgggtccaacccggtgtacctcgccgtgctggtggagttcgccaacaaggacggcacggtggtgcagctcgacgtcatggagtcgctccccagcggcaagccgacgcgggtctggacgcccatgcgccgctcctggggatccatctggcgcctcgacgccaaccaccgcctccagggccccttmtccctccgcatggtcagcgagtccggccagaccgtcatcgcccaccaggtcatcccggccaactggagggccaacaccaactacggctccaaagtccagttccgttga

SEQ ID NO: 130 - protein, 261 aa, Oryza sativa
  misc_feature (226)..(226): The 'Xaa' at location 226 stands for Leu, or Phe.
MAGASAKVVAMLLSVLATYGFAAGVVYTNDWLPAKATWYGQPNGAGPDDNGGACGFKNTNQYPFMSMTSCGNEPLFQDGKGCGACYQIRCTNNPSCSGQPRTVIITDMNYYPVARYHFDLSGTAFGAMARPGLNDQLRHAGIIDIQFRRVPCYHRGLYVNFHVEAGSNPVYLAVLVEFANKDGTVVQLDVMESLPSGKPTRVWTPMRRSWGSIWRLDANHRLQGPXSLRMVSESGQTVIAHQVIPANWRANTNYGSKVQFR

SEQ ID NO: 131 - DNA, 1482 bp, Oryza sativa
  CDS (1)..(1482)
atggacgcctccgccggaggcggggggaactcgctgccgacggcgggggccgacggggccaagcggcgggtgtgccacttctacgacgcggaggtggggaactactactgcgggcaggggcacccgatgaagccccaccgcatccggatgacccacgcgctgctcgcccactacggcctcctcgaccagatgcaggtgctcaagccccacccggcgcgcgaccgcgacctctgccgcttccacgccgacgactacgtcgccttcctccgctccgtcacgccggagacccagcaggaccagatccgggcgctcaagcgcttcaacgtcggcgaggactgccccgtcttcgacggcctctacagcttctgccagacctacgccgggggatccgtcggcggcgccgtcaagctcaaccacggccacgacatcgccatcaactgggccggcggcctccaccacgccaagaagtgcgaggcctccggcttctgctacgtcaacgacatcgtcctcgccatcctcgagctcctcaaataccaccagcgtgttctctatgtggacatcgatatccaccatggggatggtgtggaggaggcgttttacacgacggacagggtgatgacggtctcgttccacaagtttggggattatttcccgggaacaggggatatccgtgacattgggtattcagaggggaagtattactgcctgaatgtcccgctggatgatgggattgatgatgacagctaccagtccatcttcaagccgatcatcagcaaagtcatggagatgtatcgtcctggtgcagtcgtgcttcagtgcggcgctgattcgttgtccggcgataggttgggctgtttcaatctctcagggaaaggtcatgcagaatgtgtaaagttcatgaggtctttcaatgttccgttgcttcttcttggtggtggtggatatgccataagaaatgttgcacgctgttggtgctatgagacaggagttgcacttggtcatgagctcaccgacaagatgcctccaaatgagtattttgagtattttggtccagaatacagtcttttcgttgcagcaagtaacatggagaacagaaataccaacaagcaattggaggaaataaaatgcaacattctggacaatctttcaaaacttcaacatgctcctagtgtccaatttgaagagcgaattcctgaaacaaagttacctgagccagatgaagatcaagaggatccagatgaaaggcacgaccctgactctgatatggtattggatgatcacaaacctatgggacactcagcaagaagccttattcgcaacatcgaagttaagagagaaatcactgaatcagaggccaaagatcagcatggtaagagattgacaactgaacataaaggaccagaaccgatggcagacgatcctggttcctccaagcaagctcctgtaagtcgtcgtcttctctatccatctgcaaatccatag

SEQ ID NO: 132 - protein, 493 aa, Oryza sativa
MDASAGGGGNSLPTAGADGAKRRVCHFYDAEVGNYYCGQGHPMKPHRIRMTHALLAHYGLLDQMQVLKPHPARDRDLCRFHADDYVAFLRSVTPETQQDQIRALKRFNVGEDCPVFDGLYSFCQTYAGGSVGGAVKLNHGHDIAINWAGGLHHAKKCEASGFCYVNDIVLAILELLKYHQRVLYVDIDIHHGDGVEEAFYTTDRVMTVSFHKFGDYFPGTGDIRDIGYSEGKYYCLNVPLDDGIDDDSYQSIFKPIISKVMEMYRPGAVVLQCGADSLSGDRLGCFNLSGKGHAECVKFMRSFNVPLLLLGGGGYAIRNVARCWCYETGVALGHELTDKMPPNEYFEYFGPEYSLFVAASNMENRNTNKQLEEIKCNILDNLSKLQHAPSVQFEERIPETKLPEPDEDQEDPDERHDPDSDMVLDDHKPMGHSARSLIRNIEVKREITESEAKDQHGKRLTTEHKGPEPMADDPGSSKQAPVSRRLLYPSANP

SEQ ID NO: 133 - DNA, 1275 bp, Oryza sativa
  CDS (1)..(1275)
atggcgatccgcgcgaggtcctcctcctacgccgccgcggcggtcgcgctggcgctcgcgctggcgtccgtcgccgctgtcgccggcgaggtcttcttccaggagaagttcgaagatggatgggaaagtcggtgggtcaagtcagaatggaagaaggatgagaacatggctggtgaatggaaccacacatctgggaagtggaatggagatcctgaggacaaaggtatccaaacctctgaggactacaggttctacgctatttcagcggagtacccagaattcagcaacaaggataaaaccctggtgctgcagttctctgtaaagcatgagcaaaagcttgactgtggtggtggatatgtcaagttgcttggtggtgatgttgaccagaagaaatttggtggggacacaccgtacagcattatgtttggaccagacatctgtgggtacagcaccaagaaggtccatactatctttactaagaatgacaagaaccatttgatcaagaaggatgtcccctgcgagactgatcagctgtcccatgtgtacactttgatcatccatcctgatgctacatacagcatacttattgacaatgttgagaagcaatctggcagcatctacgagcactgggatattctgcctccgaagcaaatcaaggacccagaagctaagaagccagaggactgggatgacaaggagtacattcctgaccctgaggacaagaagcctgagggatacgatgatattcccaaggaaatccctgaccctgatgctaagaagcctgaggctggggctgatgaggaagatggtgagtggactgcaccaaccatccgtaaccctgagtacaagggaccatggaagcaaaagaaaatcaagaaccctaactaccagggcaaatggaagccgccgatgatcgccaccccagacttccaagatgatccttacatctacgcctttgacagcctgaagtccattggaattgagttgtggcaggtcaaatcagggactctgtttgacaacattctgattactgacgatgctgctttggccaagacattcgcagaggagacatgggccaagcacaaggatgctgagaaggctgcttttgacgaggcagagaaaaagaaggaagaggaggaagctgccaaggccggtgaggacgatgatgatttggatgacgaggatgctgaggatgaggacaaggccgatgagaaggctgactctgatgcagaggatggcaaggattctgatgatgagaagcatgatgagctctaa

SEQ ID NO: 134 - protein, 424 aa, Oryza sativa
MAIRARSSSYAAAAVALALALASVAAVAGEVFFQEKFEDGWESRWVKSEWKKDENMAGEWNHTSGKWNGDPEDKGIQTSEDYRFYAISAEYPEFSNKDKTLVLQFSVKHEQKLDCGGGYVKLLGGDVDQKKFGGDTPYSIMFGPDICGYSTKKVHTIFTKNDKNHLIKKDVPCETDQLSHVYTLIIHPDATYSILIDNVEKQSGSIYEHWDILPPKQIKDPEAKKPEDWDDKEYIPDPEDKKPEGYDDIPKEIPDPDAKKPEAGADEEDGEWTAPTIRNPEYKGPWKQKKIKNPNYQGKWKPPMIATPDFQDDPYIYAFDSLKSIGIELWQVKSGTLFDNILITDDAALAKTFAEETWAKHKDAEKAAFDEAEKKKEEEEAAKAGEDDDDLDDEDAEDEDKADEKADSDAEDGKDSDDEKHDEL

SEQ ID NO: 135 - DNA, 279 bp, Oryza sativa
  CDS (1)..(279)
atggccggcatcatccacaagatcgaggagaagctccacatgggcggaggcgagcacaagaaggaagacgagcacaagaaggagggggagcaccacaagaaggacggggagcacaaggaaggcgtggtggagaagatcaaggacaagatcaccggcgaccacggcgacggcggcgagcacaaggagaagaaggacaagaagaagaagaaggagaagaagcacggcgaggagggctaccaccacgacggccacagcagcagcagcagcgacagcgactga

SEQ ID NO: 136 - protein, 92 aa, Oryza sativa
MAGIIHKIEEKLHMGGGEHKKEDEHKKEGEHHKKDGEHKEGVVEKIKDKITGDHGDGGEHKEKKDKKKKKEKKHGEEGYHHDGHSSSSSDSD

SEQ ID NO: 137 - DNA, 3321 bp, Oryza sativa
  CDS (1)..(3321)
garargggtggaggtkacgcggaggtggattcggcggctgctgctactggtgctcgggccacggcggcgacgacaccacggaggcagtctccggcgggagctgggagcccctcgcagcgcgacgcgcggtggggtgacacgagctcctacggtgctagaaagaagcacagggttttttgccagcttccaaatagtgattgggccttatgcactgtaattacaacctccggtgacgattccgtactaaagcttcctgaaggaaaagtactgaggttgaaaacagagagccttgaagctgcaaatcctgaaattcttgacggggtggatgatcttatgcagctaagttatctaagtgagccatccgttctgtacaatttgcagtacagatactctcaagacttgatatatactaaagcaggtccagttttggtggcggtcaatccttttaagaaagttcctctatatggtaatgagtacattgatgcatatagaaataaaacaaaggatagcccacacgtttatgcaatagcagattcagccctccgtgaaatgaaaagagatgaagttaaccagtctatcatcataagtggtgagagtggagcaggaaagacagaaactgcaaagattgctatgcagtatttggcttctcttggaggtgggggtggcatagaatatgagatcctacaaaccaacccaatactcgaggcttttggcaacgcaaagacactaagaaatgacaactcaagtcgctttggaaagctcattgaaattcattttagtacaactggaaggatttgtggtgccatgattcaaacatttctacttgagaagtcaagggttgtacaatgtgcagttggcgagcgctcctaccatattttttatcaactatgtgccggtgctcctgcgtccctcagagataagttgaatatgaagaaagcggatgaatacaaatatttgaagcagagttgctgctattcaattgccggtgtggatgatgctcaaatgttccgtactgtaacggaagctatgaacatcgttcatatcagcaaagaggaccaagataatgttttcacgatggtttctgcaattctatggctaggagatgtctctttcacggtcattgacaacgaaaaccatgttgagattgttgtagatgaagcggcagaaacggtcgcaagacttcttggctgcagtattgaagatctcaatttagctttgtcgaagaggcacatgaaagttaataatgaaaatattgtacagaaactcaccctttcacaggcaatcgacacaagagatgcgttggccaagtcactctatgccagtttgtttgagtggcttgttgaacaaattaacaagtctctttcagttggcaagcgtcgaactgggagatcaatcagcattcttgatatctatggctttgaatcattcgataggaacagttttgaacagttctgtattaactatgctaatgaaaggctccaacaacatttcaatcgccatttgtttaagcttgaacaagaggaatacgttgaagatggcattgactgggcaaaggttgagtttgaggacaatcagaactgtttgaatctctttgagaaaaagccactggggttgttgtctctgctagatgaagaatctaccttccccaatgccacagatcttacttttgcgaacaagcttaagcaacatctgaacaataattcttgcttccgaggagaaagaggcaaggcttttgcagtccgtcactatgcaggagaggtggcttatgacacgtcaggttttctagagaagaatagagatttattgcacatggactcaattcagttccttgccaaatgcaaatcctcactaccacaaatgtttgcatccaaaatgctttctcaatctgataatccgttacctgttccatatagaaatagtgctgctgactcacagaagttaagtgttgcgatgaagtttaagggacaattgttccaacttatgcaaagactcgaaagtacaacaccacactttatacgttgtattaagccaaacaatttgcaactccctgcaatttatgaacaaggacttgtgcttcaacaactcaaatgttgtggggttcttgaggttgtccgaatttcaagatctggatatccaacaagaatgactcatcagaaatttgctcgacggtatggctttcttcttcttgaggatgtcgcatctcaagacccacttagtgtttcggttgcaattcttcaccagtttaacattttgcctgagatgtatcaagttgggtacacaaaattgttctttcgaactggccagattggcaaacttgaagacactcggaaccgtactctgcatggtattttaagggttcaaagctgtttcagagggcatcaagcccgtcgccatgcaagggaacgaataagaggagttttggctcttcaatcatttattcgaggtgagaatgcaagaaaaatgtattcgtctctggcaaggaaacacagggcagccattattttacagagaaatctaaaatgctggcttgcaagaagatatttcgttaacatacggaaggcttcagtagtaatacaatctggcattcgtggttgtcttgttcgaagatgtgctggcaatgttgatctattgaatgtgctaagagaattcgaatcaaagaaggaggcagagggtgaccaaattttgattaaggcatcattcctggctgagctacaaaggcgaatattaaaggccgaggcgacagtccgagaaaaggatgaagagaacgagatgcttcagcagcgacttcagcaatatgaaaaccgatggtcagaatacgagcagaaaatgaaagcgatggaggaaatgtggcagaagcaaatgcggtcattacaatcaagcctatccgtagcaaagaagagccttgctcttgatgagacgcctaggatgtccgactcatcggtcgaccagagctgggagagcaatggggttcacattggcagcgcgtcgcagctggttccacgcaccgttggacgggagatgaatgccagcatcagcgtcatcagccgcttggccgaagagttcgagcagcgcagccaggtcttcgctgatgatgccaagttcttggttgaggtcaagtccggacaggccgatgccagcctgaaccctgacatggagctccgcaggctgaagcagaacttcgactcatggaagaaggacttcggctcgcgcataagggagacgaaggtgatcctcaacaagctggggagcggcaacgaatcgtcgcccaactcggtgaagcgaaaatggtgggggaggctgaacacatccaagttttcatga

SEQ ID NO: 138 - protein, 1106 aa, Oryza sativa
  misc_feature (2)..(2): The 'Xaa' at location 2 stands for Arg, or Lys.
  misc_feature (6)..(6): The 'Xaa' at location 6 stands for Asp, or Tyr.
EXGGGXAEVDSAAAATGARATAATTPRRQSPAGAGSPSQRDARWGDTSSYGARKKHRVFCQLPNSDWALCTVITTSGDDSVLKLPEGKVLRLKTESLEAANPEILDGVDDLMQLSYLSEPSVLYNLQYRYSQDLIYTKAGPVLVAVNPFKKVPLYGNEYIDAYRNKTKDSPHVYAIADSALREMKRDEVNQSIIISGESGAGKTETAKIAMQYLASLGGGGGIEYEILQTNPILEAFGNAKTLRNDNSSRFGKLIEIHFSTTGRICGAMIQTFLLEKSRVVQCAVGERSYHIFYQLCAGAPASLRDKLNMKKADEYKYLKQSCCYSIAGVDDAQMFRTVTEAMNIVHISKEDQDNVFTMVSAILWLGDVSFTVIDNENHVEIVVDEAAETVARLLGCSIEDLNLALSKRHMKVNNENIVQKLTLSQAIDTRDALAKSLYASLFEWLVEQINKSLSVGKRRTGRSISILDIYGFESFDRNSFEQFCINYANERLQQHFNRHLFKLEQEEYVEDGIDWAKVEFEDNQNCLNLFEKKPLGLLSLLDEESTFPNATDLTFANKLKQHLNNNSCFRGERGKAFAVRHYAGEVAYDTSGFLEKNRDLLHMDSIQFLAKCKSSLPQMFASKMLSQSDNPLPVPYRNSAADSQKLSVAMKFKGQLFQLMQRLESTTPHFIRCIKPNNLQLPAIYEQGLVLQQLKCCGVLEVVRISRSGYPTRMTHQKFARRYGFLLLEDVASQDPLSVSVAILHQFNILPEMYQVGYTKLFFRTGQIGKLEDTRNRTLHGILRVQSCFRGHQARRHARERIRGVLALQSFIRGENARKMYSSLARKHRAAIILQRNLKCWLARRYFVNIRKASVVIQSGIRGCLVRRCAGNVDLLNVLREFESKKEAEGDQILIKASFLAELQRRILKAEATVREKDEENEMLQQRLQQYENRWSEYEQKMKAMEEMWQKQMRSLQSSLSVAKKSLALDETPRMSDSSVDQSWESNGVHIGSASQLVPRTVGREMNASISVISRLAEEFEQRSQVFADDAKFLVEVKSGQADASLNPDMELRRLKQNFDSWKKDFGSRIRETKVILNKLGSGNESSPNSVKRKWWGRLNTSKFS

SEQ ID NO: 139 - DNA, 495 bp, Oryza sativa
  CDS (1)..(495)
atggagaactaccaggggcagcacggctacggcgccgaccgcgtcgacgtgtacggcaacccggtcggcgccggccagtacggcggcggcgccaccgcgcccggcggaggccacggagcgatggggatgggaggtcatgccggcgccggcgccggcggccagttccagccggcgagggaggaccgcaagaccggcggcatcctccaccgctccggcagctcaagctccagctcgtcgtctgaggacgacgggatgggagggaggaggaagaaggggatcaaggagaagatcaaggagaagctgcccggcggcaacaagggcaacaaccagcagcagcagcagatgatggggaacactggcggcgcgtacgggcagcagggccacgccgggatgaccggcgccggcaccggcgtgcacggtgcggagtacggcaacgccggcgagaagaagggattcatggacaagatcaaggagaagctgcccggccagcactaa

SEQ ID NO: 140 - protein, 164 aa, Oryza sativa
MENYQGQHGYGADRVDVYGNPVGAGQYGGGATAPGGGHGAMGMGGHAGAGAGGQFQPAREDRKTGGILHRSGSSSSSSSSEDDGMGGRRKKGIKEKIKEKLPGGNKGNNQQQQQMMGNTGGAYGQQGHAGMTGAGTGVHGAEYGNAGEKKGFMDKIKEKLPGQH

SEQ ID NO: 141 - DNA, 1881 bp, Oryza sativa
  CDS (1)..(1881)
atggcgacggcggcggggatggggatcggggcggcgtgcctggtggcgccgcaggtgaggccggggaggaggttgcggctccagcgggtgcggaggcggtgcgtggcggagctgagcagggacggtgggtcggcgcagcgcccgctggcaccggcgccgctggtgaagcagccggtcctgccgaccttcctcgtgccgacgtcgacgccacccgcgcccacgcagtcgccggcgccggcgccgaccccgccgccgttgccggactccggcgtgggggagatcgagcccgatctagaaggtctcacagaagattccatcgacaaaacaatttttgtggctagtgagcaggagtctgagatcatggatgtgaaggagcaagctcaagctaaagtaacacgcagcgttgtctttgtaaccggtgaagcttctccttatgcaaagtcaggtggactaggagatgtttgtggttcactgccaattgctcttgctcttcgtggtcatcgtgtgatggttgtaatgccgagatacatgaacggggccttgaacaaaaattttgcaaacgcattttacactgagaagcacattaagattccatgctttggcggagaacatgaagttactttttttcacgagtatagggattctgttgattgggtgtttgttgatcatccctcatatcatagacctggaaatttgtatggagataattttggtgcttttggcgataatcagttcagatacacactcctgtgctatgcggcgtgtgaagccccattaattcttgaactgggaggatatatctatggacagaaatgcatgtttgttgtgaatgattggcatgccagtcttgtgccagtccttcttgctgcaaaatatagaccatatggtgtttacagggatgcccgcagtgttcttgtcatacataatctagcacatcagggtgtggagcctgccagtacatatcctgacctgggattgccacctgaatggtatggagcattagaatgggtgtttccagagtgggcaaggcggcatgcccttgacaagggtgaggcagtcaattttttaaaaggcgcagttgtgacagcagatcgaattgtgactgtcagccaggggtattcatgggaggtcacaactgctgaaggtgggcaaggcctcaatgagctcttaagctcccggaagagtgtattgaatggaattgtaaatggaattgacattaatgattggaacccatccacagacaagtttctcccttatcattattctgttgatgacctgtccggaaaggccaagtgtaaagctgaattgcagaaggagctgggtttacctataaggcccgatgtgcctctgattggctttattggaagattggactatcaaaaaggcattgatctaattaaacttgccattccagatctcatgcgggacaatattcaattcgtcatgcttggatctggtgacccaggttttgaaggatggatgagatccacagaatcagggtacagggataaatttcgtggatgggttggatttagtgttccagtttcccaccgaataactgcaggttgcgatatattgttgatgccatccagattcgaaccttgtggcctcaatcagctatatgctatgcaatatggtacagtgcctgttgttcatggaactggaggcctcagagatacagtggagaattttaacccgtttgctgagaaaggagagcagggtacagggtgggcattctcgccactaaccattgaaaaaaatgctgtgggcattgcggatggcaatttcgacatacagggaacacaagtcctcttgggagggtctaatgaagcgaggcatgtcaagcgactttacatgggaccatgccgcctcacagtatga

SEQ ID NO: 142 - protein, 626 aa, Oryza sativa
MATAAGMGIGAACLVAPQVRPGRRLRLQRVRRRCVAELSRDGGSAQRPLAPAPLVKQPVLPTFLVPTSTPPAPTQSPAPAPTPPPLPDSGVGEIEPDLEGLTEDSIDKTIFVASEQESEIMDVKEQAQAKVTRSVVFVTGEASPYAKSGGLGDVCGSLPIALALRGHRVMVVMPRYMNGALNKNFANAFYTEKHIKIPCFGGEHEVTFFHEYRDSVDWVFVDHPSYHRPGNLYGDNFGAFGDNQFRYTLLCYAACEAPLILELGGYIYGQKCMFVVNDWHASLVPVLLAAKYRPYGVYRDARSVLVIHNLAHQGVEPASTYPDLGLPPEWYGALEWVFPEWARRHALDKGEAVNFLKGAVVTADRIVTVSQGYSWEVTTAEGGQGLNELLSSRKSVLNGIVNGIDINDWNPSTDKFLPYHYSVDDLSGKAKCKAELQKELGLPIRPDVPLIGFIGRLDYQKGIDLIKLAIPDLMRDNIQFVMLGSGDPGFEGWMRSTESGYRDKFRGWVGFSVPVSHRITAGCDILLMPSRFEPCGLNQLYAMQYGTVPVVHGTGGLRDTVENFNPFAEKGEQGTGWAFSPLTIEKNAVGIADGNFDIQGTQVLLGGSNEARHVKRLYMGPCRLTV

SEQ ID NO: 143 - DNA, 1104 bp, Oryza sativa
  CDS (1)..(1104)
atggcaaccgccgccgcgtcggatctggagagcaaggccaaggcggccttcgtcgacgacgacttcgagctcgccgccgagctctacacgcaggcaatcgaggccagccccgccaccgccgagctctacgccgaccgcgcccaggcccatatcaagctaggcaactacactgaggctgtagctgatgctaacaaggccattgaacttgacccatcaatgcacaaggcttatcttcgtaaaggcgctgcatgtatacgactggaggagtatcaaactgcaaaagcagctcttgaattgggttactcgttcgcatctggtgactcaaggtttactcgcctaatgaaggagtgtgatgagcgcattgctgaggagcttactgaagtccctgttaagaaggctgaagatggagcagctgccccctctgttgcttcttttgttgaggaaaaggatgatgctgcaaacatggataatacaccaccaatggtagaagtgaagccaaaatacaggcacgacttctacaacagtgctacagaagttgtattgacaatttttgcaaagggtgttcctgctgagaatgttgttgttgattttggtgaacaaatgttaagtgtgtcgattgaagtccctggagaggagccgtaccattttcagcctcgtctgttttctaagatcatccctgagaaaagcagataccaagtgctatccacgaaggttgaaataagactggctaaagctgaacagattacatggacctcacttgattatgataaaaaaccaaaggctgttccacaaaagataatccctccagctgaatcggcccagaggccatcatatccttcctcaaaatccaagaaagactgggataaactggaagctgaagttaaaaaggaggagaaggaggagaagcttgaaggcgatgctgcattgaacaaatttttccgtgacatctacagtgatgctgatgaagacatgcgacgagcaatgatgaaatcttttgttgaatctaacggtactgttctgtcgaccaattggaaagatgttggctcgaagaaggtagagggaagcccacctgatgggatggagcttaagaaatgggagtactaa

SEQ ID NO: 144 - protein, 367 aa, Oryza sativa
MATAAASDLESKAKAAFVDDDFELAAELYTQAIEASPATAELYADRAQAHIKLGNYTEAVADANKAIELDPSMHKAYLRKGAACIRLEEYQTAKAALELGYSFASGDSRFTRLMKECDERIAEELTEVPVKKAEDGAAAPSVASFVEEKDDAANMDNTPPMVEVKPKYRHDFYNSATEVVLTIFAKGVPAENVVVDFGEQMLSVSIEVPGEEPYHFQPRLFSKIIPEKSRYQVLSTKVEIRLAKAEQITWTSLDYDKKPKAVPQKIIPPAESAQRPSYPSSKSKKDWDKLEAEVKKEEKEEKLEGDAALNKFFRDIYSDADEDMRRAMMKSFVESNGTVLSTNWKDVGSKKVEGSPPDGMELKKWEY

SEQ ID NO: 145 - DNA, 435 bp, Oryza sativa
  CDS (1)..(435)
atggtgcaggggacgctcgaggtgctgctcgtcggagccaagggcctcgagaacaccgactacctgtgcaacatggacccgtacgcggttctcaaatgccgctcgcaggagcagaagagcagcgttgcgtcaggtaaaggatctgaccctgaatggaacgaaacctttatgttcagcgtcactcacaacgctacagagctcatcatcaagttgatggacagtgacagtggcacggatgatgattttgttggagaagcaacgatttctttggaagcaatctatacagaaggaagcatacccccaactgtttataatgttgtgaaagaagaagaataccgtggagaaatcaaagtgggcctgacgttcactccagaggatgatcgcgatcggggtttatctgaggaagacattggtggatggaagcagtcatcttga

SEQ ID NO: 146 - protein, 144 aa, Oryza sativa
MVQGTLEVLLVGAKGLENTDYLCNMDPYAVLKCRSQEQKSSVASGKGSDPEWNETFMFSVTHNATELIIKLMDSDSGTDDDFVGEATISLEAIYTEGSIPPTVYNVVKEEEYRGEIKVGLTFTPEDDRDRGLSEEDIGGWKQSS

SEQ ID NO: 147 - DNA, 609 bp, Oryza sativa
  CDS (1)..(609)
atgaatcccgagtatgactacctcttcaagcttctgctcatcggagactcgggcgtcgggaagtcttgcctgcttctgaggtttgcggacgattcatatctggagagctatatcagtaccatcggcgttgattttaaaatccgcactgttgagcaagatgggaagacaataaagctgcaaatttgggatactgctggccaagagcgatttaggaccattacaagcagctactaccgtggtgcccacgggatcattgttgtttatgatgtgactgatcaggagagcttcaacaatgtcaagcagtggctgaatgaaattgataggtatgctagtgaaaatgtgaacaagctcttggtggggaacaagtgtgatctagctgagaacagagtggtttcttatgaggctggcaaggcccttgctgatgagattggaataccattcctggagaccagtgcgaaggatgcaacaaatgtggagaaggcattcatgaccatggcaggagagataaagaacaggatggcaagccaaggccgtacaaatgcaagcaagcctgcaaccgtgcaaatgccgaggcaacctgttgcccagcaaagcagctgctgctcttga

SEQ ID NO: 148 - protein, 202 aa, Oryza sativa
MNPEYDYLFKLLLIGDSGVGKSCLLLRFADDSYLESYISTIGVDFKIRTVEQDGKTIKLQIWDTAGQERFRTITSSYYRGAHGIIVVYDVTDQESFNNVKQWLNEIDRYASENVNKLLVGNKCDLAENRVVSYEAGKALADEIGIPFLETSAKDATNVEKAFMTMAGEIKNRMASQGRTNASKPATVQMPRQPVAQQSSCCS

SEQ ID NO: 149 - DNA, 1410 bp, Oryza sativa
  CDS (1)..(1410)
atgcatatgatgcggcggctcaagagcatcgcctccggccgctcgtccgtctccgatccgggtggtgattctggcaccaaaagaccaaaattcgatcaggatggagcaggagatatagtcattgagccacatctaactgatgacaaacctatgcgcgtagaccaagaatcatcttcatctcatagagatgctgaggcaagcacatctactagtaagaatcctggtagaactgaagaagcaggtgcggatattcttccaaaagaaatgaatgagatgacaataagtgatgataaagttgatggccataatgataaggaatctgaaggtgttattgttaatgcaaatggaacagaaacaggtcagattattgtgacatcaattggaggtcaaaatgggaagccaaagcagaaggtatcatacatggcagaacgtgtagttggtactggttcatttggtgtagtttttcaggccaagtgcttggaaactggagagactgttgccattaagaaggttctgcaagataaaagatataagaacagagagctccaaacaatgcaactgcttgaccatcctaatgtggtccagctaaagcatcacttcttttcgacgactgagaggggtgaagtttacctcaaccttgtacttgaatatgtctcagagacagtttatcgtgttgctaaatactacaatcggatgaaccagcgtgtgcccatattgcatgttaagctgtatgcatatcagatgtgccgtgcccttgcatatatccatcgtgttgttggtgtctgccatcgagatattaaacctcaaaatctactggtcaatcctcatacacatcaactgaagctttgtgattttggaagtgctaagaaattggttcctggtgaacctaacatatcatacatttgctcgcggtattatagggctcctgaactaatatttggagctacagagtataccacagcaattgatatctggtctgttggttgtgtactagctgagcttctgattggtcagcctctgttccctggagaaagtggtgttgatcaactggtggaaataataaagattttgggtacaccaactagagaagaaatcaggtgcatgaatccaaactattctgaattcaaattccctcagataaaagctcatccatggcacaagctttttggtaagcgcatgccacctgaagctgttgatcttgtgtcaaggttgctgcagtactcgccaaatttgcgttgcacagctgttgatgcttgtgctcatccattctttgatgaactgcgggatcccaagacctgcttgtcaaatggacgatcattaccacccttgttcgacttctcagctgctgaattggaaggccttcctgttgagctagtccaccgaatcattcctgaacatatgaggaagtga

SEQ ID NO: 150 - protein, 469 aa, Oryza sativa
MHMMRRLKSIASGRSSVSDPGGDSGTKRPKFDQDGAGDIVIEPHLTDDKPMRVDQESSSSHRDAEASTSTSKNPGRTEEAGADILPKEMNEMTISDDKVDGHNDKESEGVIVNANGTETGQIIVTSIGGQNGKPKQKVSYMAERVVGTGSFGVVFQAKCLETGETVAIKKVLQDKRYKNRELQTMQLLDHPNVVQLKHHFFSTTERGEVYLNLVLEYVSETVYRVAKYYNRMNQRVPILHVKLYAYQMCRALAYIHRVVGVCHRDIKPQNLLVNPHTHQLKLCDFGSAKKLVPGEPNISYICSRYYRAPELIFGATEYTTAIDIWSVGCVLAELLIGQPLFPGESGVDQLVEIIKILGTPTREEIRCMNPNYSEFKFPQIKAHPWHKLFGKRMPPEAVDLVSRLLQYSPNLRCTAVDACAHPFFDELRDPKTCLSNGRSLPPLFDFSAAELEGLPVELVHRIIPEHMRK

SEQ ID NO: 151 - DNA, 861 bp, Oryza sativa
  CDS (1)..(861)
atggtgaacggctacttgttccgggagtacatcggcgcgcagttcaccggcgtgcgcttctccgacgtgcccgtcaacccgggcctcagcttccacttcatcctcgccttcgccatcgactacttcatggcgacgcagtcctccaagccggcgccagccaacggcgtgttcgccccgtactgggacacggccaacctgtccccggccgccgtcgccgcggccaaggcggcgcaccccaacctcagcgtcatcctcgccctcggcggcgacaccgtccagaacaccggcgtcaacgccacgttcgcgccgacgtcgtccgtcgacgcgtgggtgcgcaacgccgccgactccgtctccggcctcatcgacgcctacggcctcgacggcgtcgacgtcgactacgagcacttcgccgccggcgtggacacgttcgtggagtgcatcggtcgcctcctcaccgagctcaaggcgcggcacccgaacatcgccacctccatcgcgccgttcgagcaccccgtggtgcagcgctactaccagccgctgtggcggcgctacgccggcgtgatcgactacgtcaacttccagttctacggctacggcgccaacaccgacgtggcgacgtacgtgatgttctacgacgagcaggcggcgaactaccccggcagcaagctgctcgccagcttcaagaccgggaacgtcaccgggctgctctcgccggagcaggggatcgccggcgcgaaggagttgcagcggcaggggaagctgccggggttgttcatctggtcagcggatagctccatggtcagcagctacaagtttgagtacgagaccaaggctcaggagatcgtcgccaaccactga

SEQ ID NO: 152 - protein, 286 aa, Oryza sativa
MVNGYLFREYIGAQFTGVRFSDVPVNPGLSFHFILAFAIDYFMATQSSKPAPANGVFAPYWDTANLSPAAVAAAKAAHPNLSVILALGGDTVQNTGVNATFAPTSSVDAWVRNAADSVSGLIDAYGLDGVDVDYEHFAAGVDTFVECIGRLLTELKARHPNIATSIAPFEHPVVQRYYQPLWRRYAGVIDYVNFQFYGYGANTDVATYVMFYDEQAANYPGSKLLASFKTGNVTGLLSPEQGIAGAKELQRQGKLPGLFIWSADSSMVSSYKFEYETKAQEIVANH

SEQ ID NO: 153 - DNA, 1476 bp, Oryza sativa
  CDS (1)..(1476)
atggatccttgcaagttccggccgtcgagctcgttcgacacgaagacgacgacgacgaacgcgggagctccggtgtggaacgacaacgaggcgctgacagtggggcccagggggccgatcctcctcgaggactaccacctgatcgagaaggtggcgcacttcgcccgggagcgcatcccggagcgcgtggtccacgcccgcggcgcctccgccaagggcttcttcgagtgcacccacgacgtcaccgacatcacctgcgccgacttcctccggtccccgggcgcccagacccccgtcatcgtccgcttctccaccgtcatccacgagcgcggcagcccggagacgatccgcgacccgcgcgggttcgccgtcaagttctacacccgcgagggcaactgggacctcctcggcaacaacttccccgtcttcttcatccgcgacggcatcaagttccccgacgtcatccacgccttcaagcccaacccgcgctcccatgtccaggagtactggagggtcttcgacttcttgtcccaccaccccgagagcctccacaccttcttcttcctcttcgacgacgtcggcatccccaccgattaccgccacatggacggcttcggcgtcaacacctacaccttcgtcacccgcgacgccaaggccaggtacgtcaagttccactggaagcccacctgcggcgtcagctgcttgatggacgacgaggccacgctcgtcggcggcaagaaccacagccacgccacccaggacctctacgactccatcgccgccggcaacttccccgagtggaagctgttcgtccaggtgatcgacccggaggaggaggagaggttcgacttcgacccgctggatgacaccaagacatggccggaggacgaggtgccgctccggcccgtggggcgcctcgttctcaaccgcaacgtcgacaacttcttcaacgagaacgagcagctggcgttcgggccggggctggtggtgccggggatctactactccgacgacaagatgctgcagtgcagggtgttcgcgtacgccgacacgcagcgctacaggctggggccaaactacctgatgctgccggtgaacgcgcccaagtgcgcccaccacaacaaccactacgacggcgccatgaacttcatgcaccgggacgaggaggtggactactacccatcgcgccacgcgccgctccgccacgcgccgccgacgcccatcacgccgcgccccgtggtggggaggaggcagaaggcgacgatacacaagcagaacgacttcaagcagcccggggagaggtacaggtcgtgggcgccggatagacaggagaggttcatcccccttcgccggcgagtcgcgcaccccaaggtctcccctgagctccgcgccatctgggtcaactacctctcccagtgtgatgagtcgttgggggtgaagattgcgaataggctcaacgtgaagccaagcatgtga

SEQ ID NO: 154 - protein, 491 aa, Oryza sativa
MDPCKFRPSSSFDTKTTTTNAGAPVWNDNEALTVGPRGPILLEDYHLIEKVAHFARERIPERVVHARGASAKGFFECTHDVTDITCADFLRSPGAQTPVIVRFSTVIHERGSPETIRDPRGFAVKFYTREGNWDLLGNNFPVFFIRDGIKFPDVIHAFKPNPRSHVQEYWRVFDFLSHHPESLHTFFFLFDDVGIPTDYRHMDGFGVNTYTFVTRDAKARYVKFHWKPTCGVSCLMDDEATLVGGKNHSHATQDLYDSIAAGNFPEWKLFVQVIDPEEEERFDFDPLDDTKTWPEDEVPLRPVGRLVLNRNVDNFFNENEQLAFGPGLVVPGIYYSDDKMLQCRVFAYADTQRYRLGPNYLMLPVNAPKCAHHNNHYDGAMNFMHRDEEVDYYPSRHAPLRHAPPTPITPRPVVGRRQKATIHKQNDFKQPGERYRSWAPDRQERFIPLRRRVAHPKVSPELRAIWVNYLSQCDESLGVKIANRLNVKPSM

SEQ ID NO: 155 - DNA, 1749 bp, Oryza sativa
  CDS (1)..(1749)
atggcggcgaacgcggggatggtggcgggatcccgcaaccggaacgagttcgtcatgatccgccccgacggcgacgcgccaccgccggctaagccagggaagagtgtgaatggtcaggtctgccagatttgtggcgacactgttggcgtctcggccaccggcgacgtctttgttgcctgcaatgagtgcgccttcccggtctgccgcccttgctacgagtacgagcgcaaggaagggaaccagtgctgcccccagtgcaagactagatacaagaggcacaaaggtagccctagagttcagggcgatgaggaggaggaagatgttgatgacctggacaatgaattcaattataagcatggcaatggcaaaggtccagagtggcagatacagagacagggggaagatgttgacctgtcttcatcttctcgccacgaacaacatcggattccccgtctgacaagtgggcaacagatctcaggagagatccctgatgcttcccccgatcgccattctatccgcagcggaacatcaagctatgttgatccaagtgttccagttcctgtgaggattgtggacccctccaaggacttgaattcctatgggattaacagtgttgactggcaagaaagagttgccagctggaggaacaagcaggacaaaaatatgatgcaggtagctaataaatatccagaggcaagagggggagacatggaagggactggttcaaatggtgaagatatccaaatggttgatgatgcacgtctacctctgagccgcatagtgcctatcccttcaaaccagctcaacctttaccggattgttatcattctccgtcttatcatcctgatgttcttcttccaatatcgtgtcactcatccagtgcgggatgcttatggattgtggctagtatctgttatctgtgaaatttggtttgccttatcctggctcctagatcaattcccaaagtggtacccgataaaccgtgaaacataccttgacaggcttgcattgagatatgatagggagggagagccatcacagcttgctcccattgatgtctttgtcagtacggtggatccactaaaggaacctcctctgatcacagcaaacactgttttgtccattctggctgtggattaccctgttgacaaagtgtcatgctatgtttctgacgatggttcagctatgttaacttttgaggctctgtcagaaactgcagaatttgctaggaagtgggttccgttttgcaagaagcacaatattgaaccacgagctccagagttttactttgctcaaaaaatagattacctgaaggacaaaatccaaccttcctttgttaaagaaaggcgggcaatgaagagagagtatgaagaattcaaggtacggatcaatgctcttgttgcgaaggcacaaaaagtacctgaagaggggtggaccatggctgatggcactgcttggcctgggaataacccaagggatcaccctggcatgattcaggtgttcttggggcacagtggtgggcttgacactgatggtaacgagttgccacggcttgtctacgtctctcgtgaaaagaggccaggattccagcatcacaagaaggctggtgcaatgaatgcattgattcgtgtatctgctgtgctgacaaatggtgcctatcttctcaatgtggattgtgatcattacttcaacaatagcaaagctcttagagaagcaatgtgcttcatgatggatcccgcactaggaaga

SEQ ID NO: 156 - protein, 583 aa, Oryza sativa
MAANAGMVAGSRNRNEFVMIRPDGDAPPPAKPGKSVNGQVCQICGDTVGVSATGDVFVACNECAFPVCRPCYEYERKEGNQCCPQCKTRYKRHKGSPRVQGDEEEEDVDDLDNEFNYKHGNGKGPEWQIQRQGEDVDLSSSSRHEQHRIPRLTSGQQISGEIPDASPDRHSIRSGTSSYVDPSVPVPVRIVDPSKDLNSYGINSVDWQERVASWRNKQDKNMMQVANKYPEARGGDMEGTGSNGEDIQMVDDARLPLSRIVPIPSNQLNLYRIVIILRLIILMFFFQYRVTHPVRDAYGLWLVSVICEIWFALSWLLDQFPKWYPINRETYLDRLALRYDREGEPSQLAPIDVFVSTVDPLKEPPLITANTVLSILAVDYPVDKVSCYVSDDGSAMLTFEALSETAEFARKWVPFCKKHNIEPRAPEFYFAQKIDYLKDKIQPSFVKERRAMKREYEEFKVRINALVAKAQKVPEEGWTMADGTAWPGNNPRDHPGMIQVFLGHSGGLDTDGNELPRLVYVSREKRPGFQHHKKAGAMNALIRVSAVLTNGAYLLNVDCDHYFNNSKALREAMCFMMDPALGR

SEQ ID NO: 157 - DNA, 438 bp, Oryza sativa
  CDS (1)..(438)
atgacgctggtgaagattggtccgtggggcggaaatggagggtcagctcaggacatcagtgtgccacccaagaagctgttaggcgtgacaatctacagctcagatgcaatcagatccattgccttcaactacatcggtgtggatggacaggaatatgccattggtccatggggtgggggcgaaagcacctctacagagattaaactgggctcctctgagcagatcaaggagatttctggaacccatggcccagtctatgatctggctgacattgtcacctatcttaagattgtgacaagtgctaataatacatacgaggctggagtcccaaatggaaaggaattcagcattccactgcaagactctggccatgtcgttggattctttggaaggtctggaacgcttatcgacgcaattggcatctacgtccacccttga

SEQ ID NO: 158 - protein, 145 aa, Oryza sativa
MTLVKIGPWGGNGGSAQDISVPPKKLLGVTIYSSDAIRSIAFNYIGVDGQEYAIGPWGGGESTSTEIKLGSSEQIKEISGTHGPVYDLADIVTYLKIVTSANNTYEAGVPNGKEFSIPLQDSGHVVGFFGRSGTLIDAIGIYVHP

SEQ ID NO: 159 - DNA, 873 bp, Oryza sativa
  CDS (1)..(873)
atggggaaggacgaggtgatggagagcggcggcgccgccggcgaattcgcggccaaggactacacggacccgccgccggcgccgctgatcgacgcggcggagctggggtcgtggtcgctgtaccgcgccgtcatcgccgagttcatcgccacgctgctgttcctgtacatcaccgtggccacggtgatcgggtacaagcaccagacggacgcgtcggcctccggcgccgacgcggcgtgcggcggcgtgggcgtgctcggcatctcgtgggcgttcggcggcatgatcttcatcctggtctactgcaccgccggcatctccggcgggcacatcaacccggcggtgacgttcgggctcttcctggcgcgcaaggtgtccctggtccgcgccatcctctacatcgtggcgcagtgcctcggcgccatctgcggcgtcgggctcgtcaatgcgttcccaaacgcctacttcaacaggtacgggggcggcgccaacaccctcgccgccggctactccaagggcaccggcctcgccgccgagatcatcggcaccttcgtgctcgtctacaccgtcttctccgccaccgaccccaagcgcaacgcccgcgactcacatgtcccggtcttggcgccgctgccaatcggcttcgccgtgttcatggtccacctggcgacgatcccgatcaccggcaccggcatcaacccggccaggagcatcggagcggccgtcatcttcaacaacgagaaggcgtggcacaaccattggatcttctgggtcggcccgttcgtcggcgccgccatcgcggcgttctaccaccagtacatcctccgggccggcgccatcaaggccctcggctccttcaggagcaacgcgtga

SEQ ID NO: 160 - protein, 290 aa, Oryza sativa
MGKDEVMESGGAAGEFAAKDYTDPPPAPLIDAAELGSWSLYRAVIAEFIATLLFLYITVATVIGYKHQTDASASGADAACGGVGVLGISWAFGGMIFILVYCTAGISGGHINPAVTFGLFLARKVSLVRAILYIVAQCLGAICGVGLVNAFPNAYFNRYGGGANTLAAGYSKGTGLAAEIIGTFVLVYTVFSATDPKRNARDSHVPVLAPLPIGFAVFMVHLATIPITGTGINPARSIGAAVIFNNEKAWHNHWIFWVGPFVGAAIAAFYHQYILRAGAIKALGSFRSNA

SEQ ID NO: 161 - DNA, 279 bp, Oryza sativa
  CDS (1)..(279)
tgcaaagtttcatatattgacgcaattcttgggacaaccgtcaaggttcccactgttgatgggatggttgacctaaagatcccctccggtacccagccaggcacaacgttagtgatgtccaagaaaggtgtcccactcctcgggaagtcaaatgctcgtggagaccagctagtgcgtgtacaggtcgagattccaaagcgtctgagcagcgacgagaggaagctgattgaagaacttgcaaacctaaacaaggctcaaacagcaaacagcaggagataa

SEQ ID NO: 162 - protein, 92 aa, Oryza sativa
CKVSYIDAILGTTVKVPTVDGMVDLKIPSGTQPGTTLVMSKKGVPLLGKSNARGDQLVRVQVEIPKRLSSDERKLIEELANLNKAQTANSRR

SEQ ID NO: 163 - DNA, 924 bp, Oryza sativa
  CDS (1)..(924)
atgagcagcccccatggcggcctcgacgaccagatcgagcgcctcatgcagtgcaagcccctccccgagcccgaggtcagagcactttgcgagaaggcaaaagagatattgatggaggagagcaacgttcaacctgtaaagagtcctgttacaatatgtggtgatattcatgggcagtttcatgaccttgcagaactgttccgaatcggtggaaagtgcccagatacaaactacttgtttatgggagattacgtggatcgtggttattattctgttgaaactgtcacgcttttggtggctttaaaggttcgttatcctcagcgaattactattctcagaggaaaccacgaaagtcgacagatcactcaagtttatggattctatgacgagtgcttaaggaagtacgggaatgcaaatgtgtggaaaacttttacagatctcttcgattacttccccttgacagcattggttgagtcagaaatattttgcctgcatggtggattatcgccatccattgagacacttgataacatacgtaacttcgatcgtgtccaagaagttccccatgaagggcccatgtgtgatcttctgtggtctgatccagacgatcgatgtggttggggtatttctcctcgaggtgctggatacaccttcgggcaggatatatcagagcagttcaaccataccaataatttaagacttattgctagagctcaccagttggtcatggagggattcaattgggctcatgagcaaaaagttgttaccatatttagtgcacctaattattgctatcgctgtgggaacatggcatcaatcttggaagttgatgattgcagggagcatacattcatccagtttgagccagccccaagaaggggagagccagatgtaactcgtagaacacctgactatttcctgtga

SEQ ID NO: 164 - protein, 307 aa, Oryza sativa
MSSPHGGLDDQIERLMQCKPLPEPEVRALCEKAKEILMEESNVQPVKSPVTICGDIHGQFHDLAELFRIGGKCPDTNYLFMGDYVDRGYYSVETVTLLVALKVRYPQRITILRGNHESRQITQVYGFYDECLRKYGNANVWKTFTDLFDYFPLTALVESEIFCLHGGLSPSIETLDNIRNFDRVQEVPHEGPMCDLLWSDPDDRCGWGISPRGAGYTFGQDISEQFNHTNNLRLIARAHQLVMEGFNWAHEQKVVTIFSAPNYCYRCGNMASILEVDDCREHTFIQFEPAPRRGEPDVTRRTPDYFL

SEQ ID NO: 165 - DNA, 675 bp, Oryza sativa
  CDS (1)..(675)
atggcaggtgctcctcgaggactagttctcctcggcgtttgtgccgtcttgatggcggtcgccgtcggcggagaggcggcgtcggtggtcgtcggcacggccaagtgcgccgactgcacccggaagaacatgaaagctgaggatgctttcaagaacctccaggtggcgattaagtgcaagaacggcaacggcgagtacgagagcaaggccactggaaagctcgacggcaccggtgccttcagcgtcccccttgacgccgacctccacagctccgactgcatcgctcagctccacagcgccaccaacgagccatgccccggccaggagccatccaagatcgtgccaatgtcggagggcacctttgctgccgtcgccggcaagacccactaccgatcggcgttgtgcgcgtccgtgaccatctgcggcccaatcaagaagaagatcatagaccacttccacaagaagccggtgccacccaagccggagccaaagccggagccacccaagcccaagcctgagccggagcacccattcctcgaccacatccacaagaaggagaagcacttcttcgaccacttccacaagaagcccgtgccacccaagcctgagcctaagcccgagcccaagccgcagcctgcgccagagtaccacaaccctagccctccggcgaattaa

SEQ ID NO: 166 - protein, 224 aa, Oryza sativa
MAGAPRGLVLLGVCAVLMAVAVGGEAASVVVGTAKCADCTRKNMKAEDAFKNLQVAIKCKNGNGEYESKATGKLDGTGAFSVPLDADLHSSDCIAQLHSATNEPCPGQEPSKIVPMSEGTFAAVAGKTHYRSALCASVTICGPIKKKIIDHFHKKPVPPKPEPKPEPPKPKPEPEHPFLDHIHKKEKHFFDHFHKKPVPPKPEPKPEPKPQPAPEYHNPSPPAN

SEQ ID NO: 167 - DNA, 1500 bp, Oryza sativa
  CDS (1)..(1500)
atggcgagttccgttttctctcggttttctatatacttttgtgttcttctattatgccatggttctatggcccagctatttaatcccagcacaaacccatggcatagtcctcggcaaggaagttttagggagtgtagatttgatagactacaagcatttgaaccacttcggaaagtgaggtcagaagctggggtgactgagtacttcgatgagaagaatgaattattccagtgcacgggtacttttgtgatccgacgtgtcattcagcctcaaggccttttggtacctcgatacacaaatattcctggcgtggtctacatcatccaagggagaggttctatgggtttaaccttccccggttgccctgcgacttaccagcaacaattccaacaattttcatctcaaggccaaagtcagagccaaaagtttagagatgagcaccaaaagattcatcaatttaggcaaggagacattgttgcactcccagctggtgttgcacattggttctacaatgatggtgatgcacctattgttgccgtatatgtttatgacgtaaacaacaacgccaatcagcttgaacctaggcaaaaggagttcctattagccggcaacaacaatcgggctcaacaacaacaagtatatggtagctcaattgagcaacactctgggcaaaacatattcagcggatttggtgttgagatgctaagtgaggctttaggcatcaacgcagtagcagcaaagaggctacagagccaaaatgatcaaagaggagagatcatacatgtgaagaatggccttcaattgttgaaaccgactttgacacaacagcaagaacaagcacaagcacaagatcaatatcaacaagttcaatacagtgaacgacagcaaacatcttctcgatggaacggattggaggagaacttttgcacgatcaaggtgagagtaaacattgaaaatcctagtcgtgctgattcatacaacccacgtgccggaaggataacaagtgtcaatagtcagaagttccccatccttaacctcatccaaatgagcgctaccagagtaaacctataccagaatgctattctctcgccgttctggaacgtcaatgctcatagtttggtctatatgattcaagggcgatctcgagttcaagtcgttagtaactttggaaagactgtgtttgatggtgtccttcgcccagcacaattattgatcattccgcaacattatgctgtcttgaagaaagcagagcgtgaaggatgccaatatatcgcaatcaagacaaacgctaacgccttcgtcagccaccttgcagggaaaaactcagtattccgtgccttgccagttgatgtagtcgctaatgcgtatcgcatctcaagggagcaagcccgaagcctcaagaacaacaggggagaagagcacggtgccttcactcctagatttcaacaacaatactacccaggattatcgaatgagtccgaaagcgagacctcagagtaa

SEQ ID NO: 168 - protein, 499 aa, Oryza sativa
MASSVFSRFSIYFCVLLLCHGSMAQLFNPSTNPWHSPRQGSFRECRFDRLQAFEPLRKVRSEAGVTEYFDEKNELFQCTGTFVIRRVIQPQGLLVPRYTNIPGVVYIIQGRGSMGLTFPGCPATYQQQFQQFSSQGQSQSQKFRDEHQKIHQFRQGDIVALPAGVAHWFYNDGDAPIVAVYVYDVNNNANQLEPRQKEFLLAGNNNRAQQQQVYGSSIEQHSGQNIFSGFGVEMLSEALGINAVAAKRLQSQNDQRGEIIHVKNGLQLLKPTLTQQQEQAQAQDQYQQVQYSERQQTSSRWNGLEENFCTIKVRVNIENPSRADSYNPRAGRITSVNSQKFPILNLIQMSATRVNLYQNAILSPFWNVNAHSLVYMIQGRSRVQVVSNFGKTVFDGVLRPAQLLIIPQHYAVLKKAEREGCQYIAIKTNANAFVSHLAGKNSVFRALPVDVVANAYRISREQARSLKNNRGEEHGAFTPRFQQQYYPGLSNESESETSE

SEQ ID NO: 169 - DNA, 1140 bp, Oryza sativa
  CDS (1)..(1140)
atggtcgaggtggaggaagtcagcaacaagatgcaggtgcagatgcgcctccaccccgccgcggcggcggaggaggaggacgccgacctcccgctccccgccctcttcgacaaggcgtcccacctccactccctcgcctccagctcctccctcgaccaggaagggatccgcaagggggtcgacctgctgcggcggtgcgacgagatggtcagtaaggtcggcctcttctcctccaacgagaccaaggatgacatctccaccgccaacctcaaatacctactcgtaccgtactaccttggggaaatgactgaaagggtagcgcaggaagatcggatcccagtccttaaggcgtcgcaggatcatttgaaggaattcatttctatctgtgaagcactggagcttatatcagaggatgagcttgaaatatctaggcagaagaacctgataccatggcaaatcgaagagcacagaaggttgcacggttcaagcgccaaaaggctgcagaaacaaagctctagaatcaaggagaggaaagaaaggcgtaggcgtcatgagagcagctgcttatcagctcctattgagctgggaggagatcttttgaggatgatggagaaggaaagagaaggcatggttagctactatctcattggctctatcgaaggctttgaccttcttgacatgttaaagaaggaagaagaaatcgttccggcagtaaaagaaggaaagcgaaggatggtaatgcatttgctcgtgaaatgcttgatgaacgtacaaaaagggctgaagcatggcaccataatgctgccaaccgtgcaccatactccaaaccagctgatccaatcacttgtgcaactaaccagtgaaagagagagaatggcagcacaagtttttcagccaagttataggttgccaacgatgagcatagaagaagctggcttacgtgagatgaaaatgatggagaaatggcaagaaagaactgccaagatgattcaagaatcaaactccgcatggcacaaggatggcagtcggtcagcccaagaggacgaggacgccgaagaggagaaagcgagaggatgggatgactggaaggacgataaccctcgtggtgcaggcaacaagaagctcactccctgtggctaa

SEQ ID NO: 170 - protein, 379 aa, Oryza sativa
MVEVEEVSNKMQVQMRLHPAAAAEEEDADLPLPALFDKASHLHSLASSSSLDQEGIRKGVDLLRRCDEMVSKVGLFSSNETKDDISTANLKYLLVPYYLGEMTERVAQEDRIPVLKASQDHLKEFISICEALELISEDELEISRQKNLIPWQIEEHRRLHGSSAKRLQKQSSRIKERKERRRRHESSCLSAPIELGGDLLRMMEKEREGMVSYYLIGSIEGFDLLDMLKKEEEIVPAVKEGKRRMVMHLLVKCLMNVQKGLKHGTIMLPTVHHTPNQLIQSLVQLTSERERMAAQVFQPSYRLPTMSIEEAGLREMKMMEKWQERTAKMIQESNSAWHKDGSRSAQEDEDAEEEKARGWDDWKDDNPRGAGNKKLTPCG

SEQ ID NO: 171 - DNA, 783 bp, Oryza sativa
  CDS (1)..(783)
atgtcgcctgctgaggcatcgcgtgaggagaatgtgtacatggcaaagcttgccgagcaggctgagcgttacgaggaaatggtcgaattcatggagaaggtggcaaagaccactgatgttggtgagctcaccgttgaggagcggaacctgctttctgtggcttacaagaacgtgattggtgctcggagggcatcgtggaggatcatctcttctattgagcagaaggaggagagccgtgggaatgaggcatatgttgcatcaattaaggagtaccgtagcaggattgaaactgagctcagcaagatctgtgatggtatccttaagcttctggattcccaccttgtcccatctgccactgctgcagagtccaaggtgttctacctgaaaatgaagggtgactaccacaggtaccttgctgagtttaagtcaggagctgagaggaaggaagcagctgagaacactcttgtggcatacaagtctgcccaggatattgcactcgctgacctgcctacaactcacccgataaggcttggacttgcactgaacttctcagtgttctactatgagatactgaactcaccagaccgtgcttgcaaccttgcaaagcaggcgttcgacgatgctattgctgaactggacactcttggcgaggagtcttacaaggacagcaccttgatcatgcaacttcttcgtgacaatctgactctctggacctctgacaatgcggaggatggtggtgacgagatcaaggaagcagcgaagcctgaaggagagggccactaa

SEQ ID NO: 172 - protein, 260 aa, Oryza sativa
MSPAEASREENVYMAKLAEQAERYEEMVEFMEKVAKTTDVGELTVEERNLLSVAYKNVIGARRASWRIISSIEQKEESRGNEAYVASIKEYRSRIETELSKICDGILKLLDSHLVPSATAAESKVFYLKMKGDYHRYLAEFKSGAERKEAAENTLVAYKSAQDIALADLPTTHPIRLGLALNFSVFYYEILNSPDRACNLAKQAFDDAIAELDTLGEESYKDSTLIMQLLRDNLTLWTSDNAEDGGDEIKEAAKPEGEGH

SEQ ID NO: 173 - DNA, 669 bp, Oryza sativa
  CDS (1)..(669)
atgggttctgaaggaccttctggtgttaccgttcacgttactggattcaagaagttccatggagtcgctgagaatccgacggagaagattgtgcgcaatcttgagtcatttatggaaaagagagggttgcctaaaggtttaacacttggaagttgcactgttcttgagactgctgggcagggtgggcttggtccgttgtatgaagtgtttgaatcagccatcgtagacaaagagtatgggttgaatgatcaggggcaagtgattctgctccattttggagtcaacagtggcacaacaaggtttgcccttgagaatcaagctattaatgaagctaccttccgttgccctgatgagctgggatggaaaccacagagggcccctattgtgtcatctgatggaagcatctcaaatttaagaaagaccactgtgcctgtgaatgaagtgaacaagtccctacaacagatgggcttcgatgtggcgccttcggatgacgctggtcgattcgtatgcaactatgtctattaccaatctcttaggttcgcagaacagcgcggtatcaagtctttgttcgtccatttccccctcttcacgacgattagtgaggaagttcagatgaacttcgtcgcaaccctcctcgaagttcttgcttcccagaactatgcacagtaa

SEQ ID NO: 174 - protein, 222 aa, Oryza sativa
MGSEGPSGVTVHVTGFKKFHGVAENPTEKIVRNLESFMEKRGLPKGLTLGSCTVLETAGQGGLGPLYEVFESAIVDKEYGLNDQGQVILLHFGVNSGTTRFALENQAINEATFRCPDELGWKPQRAPIVSSDGSISNLRKTTVPVNEVNKSLQQMGFDVAPSDDAGRFVCNYVYYQSLRFAEQRGIKSLFVHFPLFTTISEEVQMNFVATLLEVLASQNYAQ
